(19) United States
(12) Patent Application Publication
(10) Pub. No.: US 2023/0174975 A1
(43) Pub. Date: Jun. 8, 2023

(54) SYSTEMS AND METHODS FOR VIRAL GENOME TARGETING

(71) Applicant: THE BOARD OF TRUSTEES OF THE LELAND STANFORD JUNIOR UNIVERSITY, Stanford, CA (US)

(72) Inventors: Lei S. Qi, Stanford, CA (US); Marie F. LA RUSSA, Stanford, CA (US); Timothy R. ABBOTT, Stanford, CA (US); David B. LEWIS, Stanford, CA (US)

(73) Assignee: THE BOARD OF TRUSTEES OF THE LELAND STANFORD JUNIOR UNIVERSITY, Stanford, CA (US)

(21) Appl. No.: 17/911,079

(22) PCT Filed: Mar. 12, 2021
(86) PCT No.: PCT/US2021/022107

§ 371 Date: Sep. 12, 2022

Related U.S. Application Data
(60) Provisional application No. 62/989,087, filed on Mar. 13, 2020.
(60) Provisional application No. 62/989,181, filed on Mar. 13, 2020.

(51) Int. Cl. C12N 15/11; C12N 9/22; C12N 15/86; A61K 38/46; A61K 31/7088; A61P 31/14; A61K 45/06

(52) U.S. Cl. CPC C12N 15/11; C12N 9/22; C12N 15/86; A61K 38/465; A61K 31/7088; A61P 31/14; A61K 45/06; C12N 2310/20; C12N 2800/80; C12N 2320/31; C12N 2740/15043

(57) ABSTRACT

Described herein are systems for targeting viral genomes. Also described herein are methods for targeting viral genomes utilizing the systems described in the instant disclosure. In some cases, systems and methods disclosed herein can be used to treat viral infections. In preferred embodiments, the systems utilise a CRISPR/Cas13d complex to target the genome of an RNA virus such as coronavirus or influenza virus.

### CROSS-REFERENCE

[0001] This application claims the benefit of U.S. Provisional Application Ser. No. 62/989,087, filed on Mar. 13, 2020, and U.S. Provisional Application Ser. No. 62/989,181, filed on Mar. 13, 2020, each of which is incorporated herein by reference in its entirety.

### STATEMENT AS TO RIGHTS TO INVENTIONS MADE UNDER FEDERALLY SPONSORED RESEARCH AND DEVELOPMENT

[0002] This invention was made with Government support under contract HR001119C0060 awarded by DARPA. The Government has certain rights in the invention.

### SEQUENCE LISTING

[0003] The instant application contains a Sequence Listing which has been submitted electronically in ASCII format and is hereby incorporated by reference in its entirety. Said ASCII copy, created on Mar. 9, 2021, is named 55176-709_601_SL.txt and is 2,494,464 bytes in size.

### INCORPORATION BY REFERENCE

[0004] All publications, patents, and patent applications mentioned in this specification are herein incorporated by reference to the same extent as if each individual publication, patent, or patent application was specifically and individually indicated to be incorporated by reference. To the extent publications and patents or patent applications incorporated by reference contradict the disclosure contained in the specification, the specification is intended to supersede and/or take precedence over any such contradictory material.

### BACKGROUND

[0005] A number of viruses (e.g., coronaviruses, influenza viruses, etc.) can cause severe diseases and even deaths in mammals, including humans. Examples of the coronaviruses can include Severe Acute Respiratory Syndrome (SARS-CoV), SARS-CoV-2 (i.e., COVID-19), and Middle East Respiratory Syndrome (MERS-CoV). In some cases, certain virus strains can evolve and transfer to humans from diverse animal hosts that act as viral reservoirs, thereby exacerbating the threat of viral infections in humans. For example, two strains (L and S) of a virus (e.g., SARS-CoV-2) with different genome sequences can evolve and circulate, thus rendering existing vaccination or treatment strategies ineffective. In some cases, vaccines or treatment options often do not exist for some existing or new viruses.

### SUMMARY

[0006] The outbreak of unpredictable and highly contagious viral infections presents ongoing challenges. With a rapidly growing number of diseases and deaths around the world caused by viruses (e.g., coronaviruses, influenza viruses, etc.), there remains a pressing need to effectively detect, mutate, and/or degrade viral genomes to treat or prevent viral infections. There also remains a need for systems and methods to treat viral infections or diseases by targeting the transcripts of viral genomes or viral genes for degradation.

[0007] Described herein are systems and methods for targeting viral genomes or viral genes. In some cases, the viral genomes or viral genes are targeted for reducing expression or activity thereof.

[0008] Described herein, in some embodiments, is a system for reducing viral infection in a cell, comprising: a heterologous polypeptide comprising a gene regulating moiety; or one or more heterologous nucleic acid molecules, wherein at least the gene regulating moiety or the one or more heterologous nucleic acid molecules are configured to specifically bind one or more target viral genes of a coronavirus in the cell, to reduce expression or activity of the one or more target viral genes of the coronavirus in the cell, and wherein the one or more target viral genes encode: a viral RNA-dependent RNA polymerase (RdRP); or a viral nucleocapsid protein (N-protein).

[0009] In some embodiments, the one or more heterologous nucleic acid molecules comprises a plurality of different heterologous nucleic acid molecules that is collectively configured to: bind different portions of a same target viral gene of the coronavirus; or different target viral genes of the coronavirus. In some embodiments, the plurality of different heterologous nucleic acid molecules comprises at least 3, 4, 5, or 6 different heterologous nucleic acid molecules.

[0010] In some embodiments of any of the system disclosed herein, a heterologous nucleic acid molecule of the one or more heterologous nucleic acid molecules exhibits at most 3, 2, or 1 mismatch(es) when optimally aligned with a MERS-CoV genome or a SARS-CoV genome.

[0011] In some embodiments of any of the system disclosed herein, a heterologous nucleic acid molecule of the one or more heterologous nucleic acid molecules has at least about 80%, 85%, 90%, 95%, or 99% sequence identity or complementarity to a sequence selected from the group consisting of SEQ ID NOs: 4001-7203, 12101-12140, and 13101-13122.

[0012] In some embodiments of any of the system disclosed herein, the one or more target viral genes comprise a plurality of target viral genes encoding the viral RdRP and the N-protein.

[0013] In some embodiments of any of the system disclosed herein, the system is sufficient to reduce expression or activity level of the RdRP in the cell by at least about 70% or 75%, as compared to a corresponding control.

[0014] In some embodiments of any of the system disclosed herein, the system is sufficient to reduce expression or activity level of the N-protein in the cell by at least about 70%, 75%, 80%, or 85%, as compared to a corresponding control.

[0015] In some embodiments of any of the system disclosed herein, the system is sufficient to reduce infection of at least about 30%, 35%, 40%, 50%, 60%, 70%, 80%, or 85% of a plurality of different strains of the coronavirus, as compared to a corresponding control. In some embodiments, the plurality of different strains of the coronavirus comprises at least one strain from a member selected from the group consisting of alphacoronavirus, betacoronavirus, deltacoronavirus, and gammacoronavirus. In some embodiments, the plurality of different strains of the coronavirus comprises at least one strain from each of two, three, or four members selected from the group consisting of alphacoronavirus, betacoronavirus, deltacoronavirus, and gammacoronavirus. In some embodiments of any of the system disclosed herein, the plurality of different strains of the coronavirus comprises at least about 100, 500, 1000, 1500, 2000, or 2500 different strains.

[0016] In some embodiments of any of the system disclosed herein, at least the gene regulating moiety is configured to specifically bind the one or more target viral genes of the coronavirus in the cell. In some embodiments of any of the system disclosed herein, at least the one or more heterologous nucleic acid molecules are configured to specifically bind the one or more target viral genes of the coronavirus in the cell. In some embodiments of any of the system disclosed herein, the gene regulating moiety and the one or more heterologous nucleic acid molecules are collectively configured to specifically bind the one or more target viral genes of the coronavirus in the cell. In some embodiments, the gene regulating moiety is configured to form a complex with the one or more heterologous nucleic acid molecules, the complex being configured to bind the one or more target viral genes.

[0017] Described herein, in some embodiments, is a system for reducing viral infection in a cell, comprising: a heterologous polypeptide comprising a gene regulating moiety; or one or more heterologous nucleic acid molecules, wherein at least the gene regulating moiety or the one or more heterologous nucleic acid molecules are configured to specifically bind one or more non-coding regions of at least one target viral gene in the cell, to reduce expression or activity of the at least one target viral gene in the cell.

[0018] In some embodiments, the one or more heterologous nucleic acid molecules comprises a plurality of different heterologous nucleic acid molecules that is collectively configured to bind a plurality of different non-coding regions of the at least one target viral gene.

[0019] In some embodiments of any of the system disclosed herein, the plurality of different non-coding regions is operatively coupled to a same target viral gene. In some embodiments of any of the system disclosed herein, a viral sequence encoding a viral protein is flanked by the plurality of different non-coding regions. In some embodiments, the same target viral gene encodes a neuraminidase. In some embodiments, the same target viral gene encodes a hemagglutinin.

[0020] In some embodiments of any of the system disclosed herein, the plurality of different non-coding regions is operatively coupled to different target viral genes. In some embodiments, the system comprises a first target viral gene of the different target viral genes encodes a neuraminidase and a second target viral gene of the different target viral genes encodes a viral protein selected from the group consisting of a polymerase, a hemagglutinin, a nucleoprotein, a matrix protein, a non-structural protein, and a nuclear export protein. In some embodiments, the system targets a first target viral gene of the different target viral genes encodes a hemagglutinin and a second target viral gene of the different target viral genes encodes a viral protein selected from the group consisting of a polymerase, a nucleoprotein, a matrix protein, a non-structural protein, and a nuclear export protein.

[0021] In some embodiments of any of the system disclosed herein, the plurality of different heterologous nucleic acid molecules comprises at least 3, 4, 5, or 6 different heterologous nucleic acid molecules.

[0022] In some embodiments of any of the system disclosed herein, at least one target viral gene is from an influenza virus. In some embodiments of any of the system disclosed herein, one or more non-coding regions are conserved across a plurality of different influenza virus strains. In some embodiments, the plurality of different influenza virus strains comprises at least one strain from a member selected from the group consisting of influenza A, influenza B, influenza C, and influenza D. In some embodiments, the plurality of different influenza virus strains comprises subtypes of influenza A. In some embodiments, the plurality of different influenza virus strains comprises at least one strain from each of two, three, or four members selected from the group consisting of influenza A, influenza B, influenza C, and influenza D. In some embodiments, the plurality of different influenza virus strains comprises at least about 10, 20, 50, 100, or 120 different influenza virus strains.

[0023] In some embodiments of any of the system disclosed herein, the one or more non-coding regions comprise a sequence having at least about 80%, 85%, 90%, 95%, or 99% sequence identity or complementarity to a sequence selected from the group consisting of SEQ ID NOs: 13501-13548.

[0024] In some embodiments of any of the system disclosed herein, the system is sufficient to reduce infection of an influenza virus in the cell by at least about 50%, 55%, 60%, 65%, or 70%, as compared to a corresponding control.

[0025] In some embodiments of any of the system disclosed herein, at least the gene regulating moiety is configured to specifically bind the one or more non-coding regions of the at least one target viral gene. In some embodiments of any of the system disclosed herein, at least the one or more heterologous nucleic acid molecules are configured to specifically bind the one or more non-coding regions of the at least one target viral gene. In some embodiments of any of the system disclosed herein, the gene regulating moiety and the one or more heterologous nucleic acid molecules are collectively configured to specifically bind the one or more non-coding regions of the at least one target viral gene. In some embodiments, the gene regulating moiety is configured to form a complex with the one or more heterologous nucleic acid molecules, the complex being configured to bind the one or more non-coding regions of the at least one target viral gene.

[0026] Described herein, in some embodiments, is a system for reducing viral infection in a cell, comprising: a plurality of heterologous gene regulating moieties that comprises no more than 20 members; or a plurality of heterologous nucleic acid molecules that comprises no more than 20 members; wherein the plurality of heterologous gene regulating moieties or the plurality of heterologous nucleic acid molecules is configured to specifically bind at least about 70% of a plurality of strains from a plurality of RNA virus families.

[0027] In some embodiments, the plurality of strains comprises at least about 1000, 5000, 10000, 15000, 20000, or 22000 different strains. In some embodiments of any of the system disclosed herein, the specific binding is to at least about 75%, 80%, 85%, or 90% of the plurality of strains from the plurality of RNA virus families. In some embodiments of any of the system disclosed herein, the plurality of RNA virus families comprises two or members selected from the group consisting of Coronaviridae, Pneumoviridae, Paramyxoviridae, Caliciviridae, Hepeviridae, Picomaviridae, Filoviridae, Flaviviridae, Rhabdoviridae, Togaviridae, Orthomyxoviridae, and Retroviridae. In some embodiments of any of the system disclosed herein, the plurality of RNA virus families comprises two or more members selected from the group consisting of Coronaviridae, Pneumoviridae, Paramyxoviridae, Caliciviridae, Hepeviridae, Picomaviridae, Filoviridae, Flaviviridae, Rhabdoviridae, and Togaviridae.

[0028] In some embodiments of any of the system disclosed herein, at least the plurality of heterologous gene regulating moieties is configured to specifically bind at least about 70% of the plurality of strains. In some embodiments of any of the system disclosed herein, at least the plurality of heterologous nucleic acid molecules is configured to specifically bind at least about 70% of the plurality of strains. In some embodiments of any of the system disclosed herein, at least the plurality of heterologous gene regulating moieties and the plurality of heterologous nucleic acid molecules are collectively configured to specifically bind at least about 70% of the plurality of strains. In some embodiments, the system comprises a gene regulating moiety of the plurality of heterologous gene regulating moieties is configured to form a complex with a heterologous nucleic acid molecule of the plurality of plurality of heterologous nucleic acid molecules, the complex being configured to bind a target viral gene from the plurality of strains.

[0029] Described herein, in some embodiments, is a system for reducing viral infection in a cell, comprising: a plurality of heterologous gene regulating moieties that comprises no more than 20 members; or a plurality of heterologous nucleic acid molecules that comprises no more than 20 members; wherein the plurality of heterologous gene regulating moieties or the plurality of heterologous nucleic acid molecules is configured to specifically bind at least about 30% of a plurality of strains from each RNA virus family of a plurality of RNA virus families.

[0030] In some embodiments, the plurality of strains from said each RNA virus family comprises at least about 100, 200, 300, 400, 500, 1,000, 2,000, or more different strains. In some embodiments of any of the system disclosed herein, the specific binding is to at least about 35%, 40%, 45%, or 50% of the plurality of strains from said each RNA virus family. In some embodiments of any of the system disclosed herein, the specific binding is to at least about 55%, 60%, 65%, 70%, 75%, or 80% of the plurality of strains of one or more RNA virus families selected from the group consisting of Coronaviridae, Pneumoviridae, Caliciviridae, Hepeviridae, Picomaviridae, Filoviridae, Flaviviridae, and Togaviridae. In some embodiments of any of the system disclosed herein, the specific binding is to at least about 85% of the plurality of strains of one or more RNA virus families selected from the group consisting of Coronaviridae, Pneumoviridae, Hepeviridae. Picomaviridae, Filoviridae. Flaviviridae, and Togaviridae.

[0031] In some embodiments of any of the system disclosed herein, at least the plurality of heterologous gene regulating moieties is configured to specifically bind at least about 30% of the plurality of strains. In some embodiments of any of the system disclosed herein, at least the plurality of heterologous nucleic acid molecules is configured to specifically bind at least about 30% of the plurality of strains. In some embodiments of any of the system disclosed herein, at least the plurality of heterologous gene regulating moieties and the plurality of heterologous nucleic acid molecules are collectively configured to specifically bind at least about 30% of the plurality of strains. In some embodiments, the system comprises a gene regulating moiety of the plurality of heterologous gene regulating moieties is configured to form a complex with a heterologous nucleic acid molecule of the plurality of plurality of heterologous nucleic acid molecules, the complex being configured to bind a target viral gene from the plurality of strains.

[0032] In some embodiments of any of the system disclosed herein, the plurality of RNA virus families is a plurality of human-infectious RNA virus families. In some embodiments, the plurality of heterologous gene regulating moieties comprises between about 5 and about 20 different members. In some embodiments, the plurality of heterologous gene regulating moieties comprises between about 8 and about 20 different members. In some embodiments, the plurality of heterologous gene regulating moieties comprises between about 10 and about 18 different members. In some embodiments, the plurality of heterologous gene regulating moieties comprises between about 12 and about 16 different members. In some embodiments, the plurality of heterologous gene regulating moieties comprises between about 13 and about 15 different members. In some embodiments, the plurality of heterologous gene regulating moieties comprises about 14 different members.

[0033] In some embodiments of any of the system disclosed herein, a heterologous gene regulating moiety of the plurality of gene regulating moieties exhibits a specific binding to a target polynucleotide sequence, wherein the target polynucleotide sequence has at least about 50%, 60%, 70%, 80%, 85%, 90%, 95%, or 99% sequence identity or complementarity to a sequence selected from Table 11.

[0034] In some embodiments of any of the system disclosed herein, the plurality of heterologous nucleic acid molecules comprises between about 5 and about 20 different members. In some embodiments, the plurality of heterologous nucleic acid molecules comprises between about 8 and about 20 different members. In some embodiments, the plurality of heterologous nucleic acid molecules comprises between about 10 and about 18 different members. In some embodiments, the plurality of heterologous nucleic acid molecules comprises between about 12 and about 16 different members. In some embodiments, the plurality of heterologous nucleic acid molecules comprises between about 13 and about 15 different members. In some embodiments, the plurality of heterologous nucleic acid molecules comprises about 14 different members. In some embodiments of any of the system disclosed herein, a heterologous nucleic acid molecule of the plurality of heterologous nucleic acid molecules has at least about 50%, 60%, 70%, 80%, 85%, 90%, 95%, or 99% sequence identity or complementarity to a sequence selected from Table 11.

[0035] In some embodiments of any of the system disclosed herein, the heterologous nucleic acid molecule(s) has a length ranging from about 10 to about 30 nucleotides.

[0036] In some embodiments of any of the system disclosed herein, the heterologous nucleic acid molecule(s) is a heterologous guide RNA molecule.

[0037] In some embodiments of any of the system disclosed herein, the gene regulating moiety is a heterologous endonuclease. In some embodiments, the heterologous endonuclease is an RNA-targeting endonuclease. In some embodiments, the heterologous endonuclease exhibits RNA cleavage activity. In some embodiments, the heterologous endonuclease comprises a CRISPR/Cas protein or a modification thereof. In some embodiments, the CRISPR/Cas protein is Cas13. In some embodiments, the CRISPR/Cas protein is Cas13d.

[0038] In some embodiments of any of the system disclosed herein, the system comprises the heterologous polypeptide or a gene encoding thereof or the heterologous nucleic acid molecule(s) or a gene encoding thereof is packaged in a delivery vehicle selected from the group consisting of a liposome, a nanoparticle, and a viral capsule.

[0039] Described herein, in some embodiments, is a system for reducing viral infection in a cell, comprising: a first therapeutic agent configured to specifically bind a target viral gene, the first therapeutic agent comprising: a heterologous polypeptide comprising a gene regulating moiety; or a heterologous nucleic acid molecule; and a second therapeutic agent that does not specifically bind a viral gene, wherein a combination of the first and second therapeutic agents reduces viral infection in the cell.

[0040] In some embodiments, the combination effects enhanced reduction in the viral infection in the cell by at least about 10%, 20%, 30%, 40%, or 45% as compared to a corresponding control. In some embodiments, the corresponding control comprises a cell lacking the first therapeutic agent or the second therapeutic agent. In some embodiments, the corresponding control comprises a cell lacking the second therapeutic agent.

[0041] In some embodiments of any of the system disclosed herein, the first therapeutic agent or a gene encoding thereof and the second therapeutic agent are in a same composition or in different compositions.

[0042] In some embodiments of any of the system herein, a synergistic effect of the combination on the reduction of the viral replication in the cell is greater than an additive effect of the combination when performed separately. In some embodiments, a fold decrease in the viral replication from the synergistic effect is greater than that from the additive effect by at least about 1-fold, 2-fold, 3-fold, 4-fold, 6-fold, 8-fold, or 10-fold.

[0043] In some embodiments of any of the system disclosed herein, the second therapeutic agent is an immune regulator. In some embodiments, the immune regulator is a cytokine. In some embodiments, the cytokine is interferon-gamma.

[0044] In some embodiments of any of the system disclosed herein, the second therapeutic agent is an antiviral agent. In some embodiments, the antiviral agent is a small molecule. In some embodiments, the antiviral agent is Camostat.

[0045] In some embodiments of any of the system disclosed herein, the second therapeutic agent is configured to specifically bind an target endogenous gene of the cell, the target endogenous gene encoding a protein involved in viral infection or replication. In some embodiments, the protein is a transmembrane protease. In some embodiments, the transmembrane protease is TMPRSS2. In some embodiments, the protein is a MTHFD1. In some embodiments, the protein is a peptidase. In some embodiments, the protein is an aminopeptidase. In some embodiments, the protein is ANPEP.

[0046] In some embodiments of any of the system disclosed herein, the second therapeutic agent comprises: an additional heterologous polypeptide comprising an additional gene regulating moiety; or an additional heterologous nucleic acid molecule. In some embodiments, the additional gene regulating moiety is configured to specifically bind the target endogenous gene. In some embodiments, the additional heterologous nucleic acid molecule is configured to specifically bind the target endogenous gene. In some embodiments, the additional gene regulating moiety is configured to form a complex with the additional heterologous nucleic acid molecule, the complex being configured to bind the target endogenous gene. In some embodiments, the additional heterologous nucleic acid molecule is a guide nucleic acid molecule.

[0047] In some embodiments of any of the system disclosed herein, the gene regulating moiety is configured to specifically bind the target viral gene. In some embodiments of any of the system disclosed herein, the heterologous nucleic acid molecule is configured to specifically bind the target viral gene. In some embodiments of any of the system disclosed herein, the gene regulating moiety is configured to form a complex with the heterologous nucleic acid molecule, the complex being configured to bind the target viral gene. In some embodiments of any of the system disclosed herein, the heterologous nucleic acid molecule is a guide nucleic acid molecule.

[0048] In some embodiments of any of the system disclosed herein, the guide nucleic acid molecule has a length ranging from about 10 to about 30 nucleotides. In some embodiments of any of the system disclosed herein, the gene regulating moiety is a heterologous endonuclease. In some embodiments, the heterologous endonuclease is an RNA-targeting endonuclease. In some embodiments, the heterologous endonuclease exhibits RNA cleavage activity. In some embodiments, the heterologous endonuclease comprises a CRISPR/Cas protein or a modification thereof. In some embodiments, the CRISPR/Cas protein is Cas13. In some embodiments, the CRISPR/Cas protein is Cas13d.

[0049] Described herein, in some embodiments, is a system for reducing viral infection in a cell, comprising: a heterologous polypeptide comprising a gene regulating moiety that is operatively coupled to a nuclear localization signal (NLS) (gene regulating moiety-NLS); and a heterologous polynucleotide sequence encoding a guide nucleic acid molecule, wherein, upon expression of the guide nucleic acid molecule from the heterologous polynucleotide sequence in the cell, the gene regulating moiety-NLS forms a complex with the guide nucleic acid molecule, the complex being configured to bind a target viral gene to reduce the viral infection in the cell.

[0050] In some embodiments, the heterologous polynucleotide sequence is not integrated into a genome of the cell.

[0051] In some embodiments of any of the system disclosed herein, the binding effects reduction of the viral infection in the cell by at least about 10%, 20%, 30%, 40%, or 50%, as compared to a corresponding control. In some embodiments, the corresponding control comprises a cell that comprises a gene regulating moiety in absence of the NLS and the heterologous polynucleotide sequence encoding the guide nucleic acid molecule. In some embodiments, in the corresponding control, the gene regulating moiety is operatively coupled to a nuclear export signal (NES).

[0052] In some embodiments of any of the system disclosed herein, the viral infection is viral replication in the cell. In some embodiments of any of the system disclosed herein, the guide nucleic acid molecule is a guide RNA molecule. In some embodiments of any of the system disclosed herein, the guide nucleic acid molecule has a length ranging from about 10 to about 30 nucleotides. In some embodiments of any of the system disclosed herein, the gene regulating moiety is a heterologous endonuclease. In some embodiments of any of the system disclosed herein, the heterologous endonuclease is an RNA-targeting endonuclease. In some embodiments of any of the system disclosed herein, the heterologous endonuclease exhibits RNA cleavage activity. In some embodiments of any of the system disclosed herein, the heterologous endonuclease comprises a CRISPR/Cas protein or a modification thereof. In some embodiments of any of the system disclosed herein, the CRISPR/Cas protein is Cas13. In some embodiments of any of the system disclosed herein, the CRISPR/Cas protein is Cas13d.

[0053] In some embodiments of any of the system disclosed herein, heterologous polynucleotide sequence is part of a non-replicating viral vector.

[0054] Described herein, in some embodiments, is a composition comprising any of the system disclosed herein or one or more polynucleotide sequences encoding thereof. Described herein, in some embodiments, is a kit comprising the composition.

[0055] Described herein, in some embodiments, is a reaction mixture comprising: any of the system disclosed herein; and a biological sample. In some embodiments, the biological sample is selected from the group consisting of urine, blood, cell, tissue, organ, organism, and a combination thereof.

[0056] Described herein, in some embodiments, is a method of reducing viral infection in a population of cells, the method comprising contacting a cell or a population of cells with any of the system disclosed herein, wherein upon the contacting, viral infection in the cell or the population of cells is reduced. In some embodiments, the contacting occurs in vivo. In some embodiments, the contacting occurs ex vivo. In some embodiments, the contacting occurs in vitro. In some embodiments of any of the method disclosed herein, the method further comprises expressing, in the population of cells, the system or one or more polynucleotide sequences encoding thereof. In some embodiments of any of the method disclosed herein, the method further comprises administering the system or the one or more polynucleotide sequences to a subject in need thereof. In some embodiments of any of the method disclosed herein, the method comprises, subsequent to the contacting, administering one or more cells of the population of cells to a subject in need thereof.

[0057] Described herein, in some embodiments, is a method for reducing viral infection in a cell, comprising: (a) contacting the cell with a first therapeutic agent of the system disclosed herein, the first therapeutic agent comprising: (i) a heterologous polypeptide comprising a gene regulating moiety; or (ii) a heterologous nucleic acid molecule; and (b) contacting the cell with a second therapeutic agent of the system as disclosed herein, wherein a second therapeutic agent does not specifically bind a viral gene, and wherein contacting the cell with the first and second therapeutic agents reduces viral infection in the cell.

[0058] In some embodiments, the contacting the cell with the first therapeutic agent is performed prior to, simultaneously with, or subsequent to contacting the cell with the second therapeutic agent.

[0059] In some embodiments of any of the method disclosed herein, the method further comprises administering the system disclosed herein or one or more polynucleotide sequences encoding the system to a subject in need thereof, wherein the subject comprises the cell.

[0060] In some embodiments of any of the method disclosed herein, the method further comprises, subsequent to the contacting the cell with the second therapeutic agent, administering the cell to a subject in need thereof.

[0061] In some embodiments of any of the method disclosed herein, the first therapeutic agent and the second therapeutic agent are in a same composition or separate compositions.

[0062] Disclosed herein, in some embodiments, is a method for reducing viral infection in a cell, comprising: (a) contacting the cell with any of the system disclosed herein, the system comprising: (1) a heterologous polypeptide comprising a gene regulating moiety that is operatively coupled to a nuclear localization signal (NLS) (gene regulating moiety-NLS); and (2) a heterologous polynucleotide sequence encoding a guide nucleic acid molecule; and (b) expressing the guide nucleic acid molecule in the cell from the heterologous polynucleotide sequence, wherein, upon the expressing, the gene regulating moiety-NLS forms a complex with the guide nucleic acid molecule, and the complex binds a target viral gene to reduce the viral infection in the cell.

[0063] In some embodiments, the method further comprises administering the system or one or more polynucleotide sequences encoding the system to a subject in need thereof, wherein the subject comprises the cell. In some embodiments of any of the method disclosed herein, the method further comprises, subsequent to contacting the cell with the system and expressing the guide nucleic acid molecule, administering the cell to a subject in need thereof.

[0064] Described herein, in some embodiments, a nucleic acid composition comprising a RNA-binding guide RNA, wherein the RNA-binding guide RNA comprises a targeting sequence that has a length ranging between about 10 to about 30 nucleotides and is characterized by one or more members selected from the group consisting of: (i) the targeting sequence exhibits at least about 80% sequence identity or complementarity to any one of SEQ ID NOs: 4001-7203, 12101-12140, and 13101-13122; (ii) the targeting sequence is configured to bind a polynucleotide fragment within a coronavirus genome, wherein the polynucleotide fragment has a length of between about 10 and about 30 nucleotides and exhibits at least about 80% sequence identity or complementarity to a conserved region of the coronavirus genome that encodes a RNA-dependent RNA polymerase (RdRP) a nucleocapsid protein (N-protein); and (iii) the targeting sequence comprises at most 3 mismatches when optimally aligned with a MERS-CoV genome or a SARS-CoV genome.

[0065] In some embodiments, the targeting sequence exhibits at least about 80%, 85%, 90%, 95%, or 99% sequence identity or complementarity to any one of SEQ ID NOs: 4001-7203, 12101-12140, and 13101-13122. In some embodiments, the targeting sequence exhibits at least about 80%, 85%, 90%, 95%, or 99% sequence identity or complementarity to any one of SEQ ID NOs: 4001-7203. In some embodiments, the targeting sequence exhibits at least about 80%, 85%, 90%, 95%, or 99% sequence identity or complementarity to any one of SEQ ID NOs: 12101-12140. In some embodiments, the targeting sequence exhibits at least about 80%, 85%, 90%, 95%, or 99% sequence identity or complementarity to any one of SEQ ID NOs: 13101-13122. In some embodiments, the targeting sequence exhibits at least about 80%, 85%, 90%, 95%, or 99% sequence identity or complementarity to any one of SEQ ID NO: 13101-13106. In some embodiments, targeting sequence is configured to bind the polynucleotide fragment within the coronavirus genome, wherein the polynucleotide fragment has a length of between about 10 and about 30 nucleotides and exhibits at least about 80%, 85%, 90%, 95%, or 99% sequence identity or complementarity to the conserved region of the coronavirus genome that encodes the RdRP or the N-protein. In some embodiments, the targeting sequence comprises at most 3, 2, or 1 mismatch(es) when optimally aligned with the MERS-CoV genome or the SARS-CoV genome.

[0066] In some embodiments of any of the nucleic acid composition disclosed herein, a mismatch is an insertion or a deletion. In some embodiments of any of the nucleic acid composition disclosed herein, the nucleic acid composition is characterized by two or more members selected from the group consisting of (i), (ii), and (iii). In some embodiments of any of the nucleic acid composition disclosed herein, the nucleic acid composition is characterized by all of (i), (ii), and (iii). In some embodiments of any of the nucleic acid composition disclosed herein, the nucleic acid composition comprises a plurality of different RNA-binding guide RNAs comprising the RNA-binding guide RNA, wherein each of the plurality of different RNA-binding guide RNAs is characterized by one or more members selected from the group consisting of (i), (ii), and (iii). In some embodiments of any of the nucleic acid composition disclosed herein, each of the plurality of different RNA-binding guide RNAs is characterized by two or more members selected from the group consisting of (i), (ii), and (iii). In some embodiments of any of the nucleic acid composition disclosed herein, each of the plurality of different RNA-binding guide RNAs is characterized by all of (i), (ii), and (iii). In some embodiments of any of the nucleic acid composition disclosed herein, the plurality of different RNA-binding guide RNAs comprises at least 3, 4, 5, or 6 different RNA-binding guide RNAs.

[0067] Described herein, in some embodiments, is a nucleic acid composition comprising a plurality of different RNA-binding guide RNAs, wherein no more than six members of the plurality collectively exhibits specific binding to at least about 50% of a plurality of different strains of coronaviruses selected from the group consisting of alphacoronavirus, betacoronavirus, deltacoronavirus, and gammacoronavirus.

[0068] Described herein, in some embodiments, is a nucleic acid composition comprising a plurality of different RNA-binding guide RNAs, wherein no more than six members of the plurality collectively exhibits specific binding to at least about 50% of a plurality of different strains of coronaviruses selected from the group consisting of coronaviruses as identified by GenBank Access ID.

[0069] In some embodiments of any of the nucleic acid composition disclosed herein, the specific binding is to at least about 50%, 60%, 70%, 80%, 85%, 90%, 95%, or 99% of the plurality of different strains. In some embodiments of any of the nucleic acid composition disclosed herein, the plurality of different strains of the coronavirus comprises at least about 100, 500, 1000, 1500, 2000, or 2500 different strains. In some embodiments of any of the nucleic acid composition disclosed herein, the plurality of different strains of the coronavirus comprises at least one strain from each of two, three, or four members selected from the group consisting of alphacoronavirus, betacoronavirus, deltacoronavirus, and gammacoronavirus. In some embodiments of any of the nucleic acid composition disclosed herein, the plurality of different RNA-binding guide RNAs is selected from the group consisting of the sequences in Table 4.

[0070] Described herein, in some embodiments, is a nucleic acid composition comprising one or more RNA-binding guide RNAs, wherein a RNA-binding guide RNA of the one or more RNA-binding guide RNAs comprises a targeting sequence that has a length ranging between about 10 to about 30, and wherein the RNA-binding guide RNA has at least about 80% sequence identity or complementarity to any one of SEQ ID NOs: 13301-13348.

[0071] In some embodiments, the RNA-binding guide RNA has at least about 85%, 90%, 95%, or 99% sequence identity or complementarity to any one of SEQ ID NOs: 13301-13348. In some embodiments, the RNA-binding guide RNA has at least about 80%, 85%, 90%, 95%, or 99% sequence identity or complementarity to any one of SEQ ID NOs: 13319-13324 and 13331-13336. In some embodiments, the one or more RNA-binding guide RNAs comprise a plurality of different RNA-binding guide RNAs. In some embodiments, the plurality of different RNA-binding guide RNAs comprises between about two and about eight different RNA-binding guide RNAs. In some embodiments, the plurality of different RNA-binding guide RNAs comprises between about four and about eight different RNA-binding guide RNAs. In some embodiments, the plurality of different RNA-binding guide RNAs comprises between about five and about seven different RNA-binding guide RNAs. In some embodiments, the plurality of different RNA-binding guide RNAs comprises about six different RNA-binding guide RNAs.

[0072] In some embodiments of any of the nucleic acid composition disclosed herein, the plurality of different RNA-binding guide RNAs comprises (i) a first RNA-binding guide RNA having at least about 80%, 85%, 90%, 95%, or 99% sequence identity or complementarity to any one of SEQ ID NOs: 13319-13324 or (ii) a second RNA-binding guide RNA having at least about 80%, 85%, 90%, 95%, or 99% sequence identity or complementarity to any one of SEQ ID NOs: 13331-13336.

[0073] In some embodiments of any of the nucleic acid composition disclosed herein, the plurality of different RNA-binding guide RNAs comprises the first RNA-binding guide RNA and the second RNA-binding guide RNA.

[0074] Described herein, in some embodiments, is a nucleic acid composition comprising one or more RNA-binding guide RNAs, wherein a RNA-binding guide RNA of the one or more RNA-binding guide RNAs comprises a targeting sequence that has a length ranging between about 10 to about 30, and wherein the RNA-binding guide RNA has at least about 80% sequence identity or complementarity to a sequence selected from Table 11.

[0075] In some embodiments, the RNA-binding guide RNA has at least about 85%, 90%, 95%, or 99% sequence identity or complementarity to a sequence selected from Table 11.

[0076] In some embodiments of any of the nucleic acid composition disclosed herein, the one or more RNA-binding guide RNAs comprise a plurality of different RNA-binding guide RNAs. In some embodiments, the plurality of different RNA-binding guide RNAs comprises between about 5 and about 20 different RNA-binding guide RNAs. In some embodiments, the plurality of different RNA-binding guide RNAs comprises between about 8 and about 20 different RNA-binding guide RNAs. In some embodiments, the plurality of different RNA-binding guide RNAs comprises between about 10 and about 18 different RNA-binding guide RNAs. In some embodiments, the plurality of different RNA-binding guide RNAs comprises between about 12 and about 16 different RNA-binding guide RNAs. In some embodiments, the plurality of different RNA-binding guide RNAs comprises about 14 different RNA-binding guide RNAs.

### BRIEF DESCRIPTION OF THE DRAWINGS

[0077] The novel features of the invention are set forth with particularity in the appended claims. A better understanding of the features and advantages of the present invention will be obtained by reference to the following detailed description that sets forth illustrative embodiments, in which the principles of the invention are utilized, and the accompanying drawings of which:

[0078] FIG. 1 illustrates the hypothetical life cycle of SARS-CoV-2 and the approach for using CRISPR-Cas13 for preventing viral gene expression and degrading viral genome. FIG. 1A illustrates a hypothetical life cycle of SARS-CoV-2 based on information about other coronavirus life cycles. SARS-CoV-2 virions bind to the ACE2 receptor on the surface of cells via interactions with the Spike protein. Upon viral release, the positive strand RNA genome serves as a template to make negative strand genomic and subgenomic templates, which are used to produce more copies of the positive strand viral genome and viral mRNAs.

[0079] FIG. 1B illustrates how Cas13d can inhibit viral function and replication by directly targeting and cleaving all viral positive-sense RNA.

[0080] FIG. 2 illustrates bioinformatic analysis of Cas13d target sites for SARS-CoV-2 and construction of a prophylactic antiviral CRISPR in human cells (PAC-MAN) system. FIG. 2A depicts alignment of sequences from 47 patient-derived SARS-CoV-2 strains along with SARS-CoV and MERS-CoV. Top panel: predicted abundance of crRNAs that are able to target SARS-CoV-2 genomes and SARS or MERS; Middle panel: annotation of genes in the SARS-CoV-2 genomes, along with conserved regions chosen to be synthesized into the SARS-CoV-2 reporters (in light gray and dark gray). These regions indicate the synthesized SARS-CoV-2 fragments; Bottom panel: the percent of conservation between aligned viral genomes. See SEQ ID NOs: 12001-12040: 12101-12140; or 12201-12240 for the designed crRNA sequences and Table 2 (SEQ ID NOs: 12251 and 12252) for synthesized SARS-CoV-2 fragments. FIG. 2B depicts schematic of the two reporters (SARS-CoV-2-F1/F2) created with synthesized viral sequences. SARS-CoV-2-F1 contains GFP fused to a portion of RdRP (RdRP-F1) and SARS-CoV-2-F2 contains GFP fused to portions of both RdRP (RDRP-F2) and N. FIG. 2C shows schematics for the constructs used to express Cas13d or its crRNAs. FIG. 2D shows the workflow used to challenge Cas13d A549 lung epithelial cells with SARS-CoV-2 reporters.

[0081] FIG. 3 illustrates how Cas13d PAC-MAN can effectively repress SARS-CoV-2 reporters. FIG. 3A, left panel: schematics of pools of crRNAs targeting the SARS-CoV-2-F1 reporter for transfection; middle penal: GFP expression as measured by flow cytometry; and right panel: mRNA abundance as measured by qRT-PCR. P values for each group are shown in Table 3. FIG. 3B, left panel: schematics of pools of crRNAs targeting the SARS-CoV-2-F2 reporter for transfection; middle panel: GFP expression as measured by flow cytometry; and right panel: mRNA abundance as measured by qRT-PCR. P values for each group are shown in Table 3. FIG. 3C illustrates GFP expression as measured by flow cytometry when SARS-CoV-2-F1 (left) or SARS-CoV-2-F2 (right) was delivered via lentiviral transduction. P values are labeled for each group; MOI=0.5. FIG. 3D illustrates RNA abundance measured by qRT-PCR when SARS-CoV-2-F1 (left) or SARS-CoV-F2 (right) is delivered via lentiviral transduction. P values are labeled for each group; MOI=0.5. FIG. 3E, top panel: schematic of pools of crRNAs tiling across SARS-CoV-2-F1 and SARS-CoV-2-F2 reporters; and bottom panel: GFP expression levels as measured by flow cytometry. Dark gray, SARS-CoV-2-F1 reporter; light gray, SARS-CoV-2-F2 reporter. NT, non-targeting crRNA controls.

[0082] FIG. 4 illustrates the minimum numbers of crRNA necessary to target certain percentages of all known coronavirus genomes. FIG. 4A illustrates a phylogenetic tree of all sequenced coronaviruses, organized by genus. The inner ring depicts coverage by each of the top 6 PAC-MAN-T6 pan-coronavirus crRNAs. The outer ring shows current species of coronaviruses that are infectious to humans, including SARS-COV-2 (444). FIG. 4B illustrates a histogram showing the minimum number of predicted crRNAs it would take to cover a maximum number of coronavirus genomes.

[0083] FIG. 5 illustrates a flowchart to design crRNA by analyzing all possible crRNAs that target regions conserved between reported SARS-CoV-2. SARS-CoV, and MERS-CoV.

[0084] FIG. 6 illustrates flow cytometry plots demonstrating SARS-CoV-2-19 F1 and F2 transfection and transduction. FIG. 6A illustrates examination of SARS-CoV-2-19 reporter levels in A549 cells 48 hours after transfection or transduction. While transfection led to a much lower percentage of GFP positive cells compared to transduction, transfection also led to much higher levels of GFP expression, giving a better dynamic range of repression. FIG. 6B shows representative flow histograms of GFP reporter levels after SARS-CoV-2 reporter challenge. Cells shown were gated for GFP+ cells only.

[0085] FIG. 7 illustrates Flow cytometry plots demonstrating tiled crRNAs with a strong repression of the SARS-CoV-2 F1 and F2 reporters. FIG. 7A shows flow cytometry histograms of GFP expression after SARS-CoV-2-F1 (left) and SARS-CoV-2-F2 (right) reporter challenge. FIG. 7B shows analysis of different expression levels of Cas13d (marker: mCherry) and crRNA pools (marker: BFP) and the resulting effects on SARS-CoV-2-F1/F2 reporter inhibition. Percent reduction of GFP expression is labeled on the top.

[0086] FIG. 8 illustrates a bioinformatic pipeline to predict minimum sets of pan-coronavirus crRNA designs. The bioinformatic pipeline analyzed and predicted pan-coronavirus targeting crRNAs. The number of crRNAs at each step of the workflow is denoted in parentheses.

[0087] FIGS. 9A-9D illustrate the crRNA-N18f can target all 202 sequenced SARS-CoV-2 genomes, including S and L strains. Different strains of SARS-CoV-2 are shown in labels on the right: S, L, or unknown (U). * indicates the SARS-CoV-2 sequence that carries a single mutation in the crRNA-N18f targeting region. FIGS. 9A-9D disclose

″UGAACCAAGACGCAGUAUUAUU″ as SEQ ID NO: 5590,
″AGGTTTACCCAATAATACTGCGTCTTGGTTCACCGCTCTCAC″ as SEQ ID NO: 13737,
″GGGATTACCCAATAATACTGCGTCTTGGTTCACCGCTCTCAC″ as SEQ ID NO: 13738,
and
″GGGATTACCCAATAGTACTGCGTCTTGGTTCACCGCTCTCAC″ as SEQ ID NO: 13739.

[0088] FIG. 10 illustrates crRNAs (guide RNA) design targeting the human 229E coronavirus genome.

[0089] FIG. 11 illustrates that the 40 crRNAs (SEQ ID NO: 13607-SEQ ID NO: 13646) targeting 229E were tested in MRC-5 cells. The crRNAs which helped cell survive better than control were selected. The viral titer in the supernatant were determined by RT-qPCR. One or more guides based on one or more crRNAs provided herein inhibited the virus replication to >60%, e.g., the best one N20 reached to 95%.

[0090] FIG. 12 illustrates repeat testing of crRNAs targeting 229E. FIG. 12A illustrates crRNAs from the screen assay for repeat testing. While crR8 (SEQ ID NO: 13614), crR19 (SEQ ID NO: 13625), crN1 (SEQ ID NO: 13627), and crN2 (SEQ ID NO: 13628) inhibited about 80% of virus replication, crN4 (SEQ ID NO: 13630), crN9 (SEQ ID NO: 13635), and crN20 (SEQ ID NO: 13646) reached to more than 90%. NLS CasRx were compared with NES version using the crN1 guide. The NLS version (92.5% inhibition) worked better than the NLS and NES mixture (81%). The NES version worked the worst (10%). The result from cellular RNA was in consistence with the supernatant. PAC-MAN may decrease the viral RNA in cellular and the released virus in supernatant. FIG. 12B illustrates repeat testing with cellular RNA. FIG. 12C illustrates repeat testing with cellular RNA and with ActB as inner control.

[0091] FIG. 13 illustrates testing of CasRx with no tags or tagged with nuclear localization signal (NLS), nuclear export signal (NES), or endoplasmic reticulum (ER) signal. Since the NLS Cas13d worked better than NES, Cas13d without a tag or was fused with ER location signal. From the result, Cas13d-NLS still worked the best, with a 83% inhibition effect, while Cas13d with no tag had 56% inhibition effect, Cas13d-ER had no effect, and Cas13d-NES had only 16% inhibition effect.

[0092] FIG. 14 illustrates how NLS-version of the PAC-MAN worked better than NES-version of the PAC-MAN. MRC5 cells were treated with NLS- or NES-version of PAC-MAN followed by infection of 0.1 MOI 229E. Then cells were stained with 229E RNA FISH N-probe and imaged by confocal. FIG. 14A. RNA FISH probe set-1: targeting N gene (detecting all viral RNA). Same contrast adjustment was used for “Normal contrast” or “High contrast” lane of each group; thus, the intensity was comparable between each group. The signal of 229E FISH in N20 group was significantly decreased compared with non-target guide (NT6) control group, supporting the high efficiency of PAC-MAN. FIG. 14B. The cell without detectable CasRx in cytosol (pointed by white arrow) had intensive signals of 229E FISH, while the cell with CasRx in cytosol (pointed by grey arrow) did not have detectable signals of 229E FISH, indicating that the cytosolic CasRx may be important for the high efficiency of PAC-MAN. FIG. 14C. The signals of 229E FISH were much more intensive in NES-CasRx group compared with that in NLS-CasRx group, though the signals of CasRx in cytosol of the two groups did not have significant difference as shown by the cells pointed by the white or grey arrows. The high efficiency of the NLS-version PAC-MAN compared with the NES-version PAC-MAN was due to the low efficient transport of gRNA to the cytosol and the disability of gRNA in cytosol.

[0093] FIG. 15 illustrates another representative image of cells with/without cytosolic CasRx. High expression of Cas13d (CasRx) may leak some Cas13d to cytosol, these Cas13d-crRNA may repress virus replication. The merge picture showed that the cell with Cas13d cytoplasm expression delete the virus. Some cells may not delete virus, because of lack of Cas13d cytoplasm expression.

[0094] FIG. 16 illustrates analysis of captured images of FIG. 14 and FIG. 15. Referring to FIG. 16A, for cells expressing NLS-CasRx and gRNA in N20 (SEQ ID NO: 13646) and NT6 groups, the number of cells with/without 229E FISH signal was counted. Then, the ratio of cells without 229E FISH signal was calculated. The number of cells with or without 229E viral RNAs (top) and the ratio of cells without 229E viral RNAs (bottom) in MRC5 cells expressed NLS-dCasRx-mCherry and gRNA-N20 or gRNA-NT6. FIG. 16B. For cells with or without NLS-CasRx expressed in cytosol in N20 group, the number of cells with/without 229E FISH signal was counted. Then, the ratio of cells without 229E FISH signal was calculated. The expression level of CasRx in most cells with NLS-CasRx in cytosol was higher than that of cells without NLS-CasRx in cytosol. The number of cells with or without 229E viral RNAs (top) and the ratio of cells without 229E viral RNAs (bottom) in gRNA-N20-transduced MRC5 cells with NLS-dCasRx-mCherry expressed in both cytoplasm and nucleus or only in nucleus. The MRC5 cells also expressed ER-GFP and were infected with 0.1 MOI 229E.

[0095] FIG. 17 illustrates that the lentivirus transduced gRNA stayed in nucleus, thus NLS-Cas13d may enter into the nucleus to complex with the gRNA and leached out of nucleus. In contrast, NES-Cas13d may not enter the nucleus, thus may not form a complex with the gRNA in the nucleus to the same extent, thus not as effective in reducing coronavirus replication. The MRC-5 cells in “Lentivirus-Guide” were co-transduced with NES- or NLS-CasRx and guide. 6 h post transfection, the cells were infected with 229E at an MOI of 0.01. The virus titer in media was determined by RT-qPCR at 24 and 48 hpi.

[0096] FIG. 18 illustrates how PAC-MAN helped cell surviving 229E infection. The MRC-5 cells were co-transduced with NLS-CasRx and guide, then infected with 229E at an MOI of 0.01 at 2 days after transduction. The culture media was added with 100-250 nM of incucyte cytotox green dye for real-time quantification of cell death. The cells were imaged for 3 days using IncuCyte live-cell imaging system.

[0097] FIG. 19 illustrates repeat testing PAC-MAN with mock control. FIG. 19A illustrates 229E targeting guide N20 protected the cells from death during a 5 day infection, while most cells transduced with a non-targeting guide (NT6) or mock control were dead. FIG. 19B illustrates integrated intensity of the cells transuded with NT6, N20, or mock control.

[0098] FIG. 20 illustrates testing with PAC-MAN with 229E fused with GFP (229E-GFP). The 229E-GFP virus was used to validate the effect of PAC-MAN. The virus may infect and replicate in the cells transduced with non-targeting guide with many GFP positive cells showed up, while not in the cells transduced with 229E targeting guides.

[0099] FIG. 21 illustrates testing of PAC-MAN against 229E infection at different multiplicity of infections (MOIs). The 229E targeting guide N20 protected the cells from death, while most cells transduced with a non-targeting guide NT6 were dead. FIG. 21A illustrates that the PAC-MAN inhibited virus replication and protected cells from death even when infected at an MOI as high as 1.0, 100-fold higher than the frequently used 0.01 in the in vitro assays. FIG. 21B illustrates a lentiviral dose test.

[0100] FIG. 22 illustrates PAC-MAN dose effect. In consistent with the dose effect assay in FIG. 21, FIG. 22 illustrates that the higher dose of PAC-MAN components were transduced, the higher number of cells survived the 229E infection and the longer the cells kept alive.

[0101] FIG. 23 illustrates synergistic effect of treating the infected cells with PAC-MAN and IFN alpha (IFNα) 4b and Camostat mesylate. FIG. 23A illustrates the cytotoxicity of the IFNα 4b and Camostat mesylate and their effect on inhibition of 229E virus. These two drug showed no obvious cytotoxicity at the tested concentrations. The EC50 of IFNα 4b is 1 U/ml. The EC50 of Camostat mesylate was about 500 μM. When combining these two drugs with PAC-MAN, an enhance effect was observed as the combination further decreased virus replication. FIG. 23B illustrates the synergistic effect at 24 hour post-infection (hpi). FIG. 23C illustrates IFNα showing redundant effect with PAC-MAN and Camostat mesylate showing synergistic effects with PAC-MAN.

[0102] FIG. 24 illustrates RNAseq for determining the off-target effect of PAC-MAN targeting 229E. The top graphs are replicates of every sample. The graphs show that the replicates are consistent. The bottom graphs show Cas13d+crRNA compared to Cas13d only sample, which doesn't show any off-target effect. The axes plot FPKM (Fragments Per Kilobase Per Million Reads) for each gene. FPKM was calculated by dividing the number of reads for each gene by the gene's length in kilobases and by the total number of reads in millions.

[0103] FIG. 25 illustrates screening of crRNAs targeting SARS-CoV-2. FIG. 25A illustrates supernatant test showing that many crRNAs may decrease viral RNA load. Cas13d expressing VeroE6 cells were transduced with different crRNAs targeting SARS-CoV-2. After two days, cells were infected with SARS-CoV-2 (MOI=0.01). At 48 hpi, qPCR was performed for RdRP copy number of the supernatant. Lines indicate means, error bars indicate s.d. (n=3 independent biological replicates). FIG. 25B illustrates supernatant test at 24 hpi. Cas13d expressing clonal VeroE6 cells were transduced with different crRNAs or crRNA combinations which target SARS-CoV-2. After two days, cells were infected with SARS-CoV-2 (MOI=0.01). (B) At 24 hpi, (D) At 48 hpi, (E) At 72 hpi, qPCR was performed for RdRP copy number of the supernatant. Lines indicate means; error bars indicate s.d. The data represent three independent biological experiments performed in technical replicates (n=9). FIG. 25C illustrates cell sample test at 24 hpi. Cas13d expressing clonal VeroE6 cells were transduced with different crRNAs or crRNA combinations which target SARS-CoV-2. After two days, cells were infected with SARS-CoV-2 (MOI=0.01). At 24 hpi, qPCR was performed for intracellular RdRP copy number of the cell samples. Copy numbers of each condition were normalized against NT6 control condition. Lines indicate means; error bars indicate s.d. The data represent three independent biological experiments performed in technical replicates (n=9). FIG. 25D illustrates supernatant test at 48 hpi. FIG. 25D illustrates cell sample test at 48 hpi.

[0104] FIG. 26 illustrates screening of crRNAs targeting SARS-CoV-2 at 72 hpi. FIG. 26A illustrates supernatant test showing that crRNAs targeting SARS-CoV-2 may dramatically decrease viral RNA load. FIG. 26B and FIG. 26C illustrate summary of repeat testing of protecting cells from SARS-CoV-2 infection at 72 hpi. At 24 hpi, 48 hpi, and 72 hpi, qPCR was performed for RdRP copy number of the supernatant. Lines indicate means; error bars indicate s.d. The data represented three independent biological experiments performed in technical replicates (n=9).

[0105] FIG. 27A illustrates comparison of gene expression in A549 cells transfected with Cas13d and A549 cells transfected Cas13d plus crRNAs targeting SARS-CoV-2. The axes plot FPKM (Fragments Per Kilobase Per Million Reads) for each gene. FPKM was calculated by dividing the number of reads for each gene by the gene's length in kilobases and by the total number of reads in millions.

[0106] FIG. 27B illustrates how the PAC-MAN with designed crRNAs efficiently knocked down endogenous genes: alanine aminopeptidase (APN, SEQ ID NOs: 13601-13064), transmembrane protease, serine 2 (TMPRSS2, SEQ ID NO: 13605), methylenetetrahydrofolate dehydrogenase 1 (MTHFD1, SEQ ID NO: 13606) and also helped blocking virus replication or propagation. A549 cells were transduced with Cas13d and crRNAs targeting to endogenous genes: APN (left), TMPRSS2 (middle), and MTHFD1 (right). After 3 days, qPCR was performed for targeting gene expression. Relative gene mRNA expression was normalized against wild type cell condition. Lines indicate means; error bars indicate s.d. The data represent three independent biological experiments performed in technical replicates (n=9).

[0107] FIG. 28 illustrates inhibition of IAV infection using Cas13d PAC-MAN. FIG. 28A is the workflow used to challenge Cas13d A549 lung epithelial cells with PR8 mNeon IAV. FIG. 28B shows the screening of pools of 6 crRNAs targeting each of the eight IAV genome segments. The percentage of mNeon+ cells in each of the eight crRNA conditions compared to a pool of non-targeting control (NT) crRNAs at an MOI of 2.5 (left) or 5 (right). FIG. 28C shows microscopy quantification of the percentage of mNeon+ cells per field of view (FOV) at an MOI of 2.5 (p=1×10⁻⁵, left) and 5 (p=5×10⁻⁹, right). Each dot represents the percentage for a single microscopy FOV. N=48 FOV. FIG. 28D shows flow cytometry evaluation of the percentage of mNeon+ cells at an MOI of 2.5 (p=0.039, left) and 5 (p=0.0058, right). N=6.

[0108] FIG. 29A illustrates screening of pools of 6 crRNAs targeting each of the eight IAV genome segments. Each panel shows the percentage of quantified mNeon+ cells under two infection conditions (MOI=2.5 or 5). Each dot represents the percentage for a single microscopy field of view (FOV). Light gray, non-targeting (NT) crRNAs; dark gray, targeting crRNAs.

[0109] FIG. 29B illustrates testing of pools of 6 crRNAs targeting IAV S4 and S6 using a lower MOI of 0.5. Each dot represents the percentage for a single microscopy field of view (FOV). Light gray, non-targeting (NT) crRNAs; dark gray, targeting crRNAs.

[0110] FIG. 30 illustrates analysis of PAC-MAN for targeting broad-spectrum RNA viruses.

[0111] FIG. 30A. An integrated pipeline for Cas13 crRNA analysis for virus-targeting coverage, efficiency, and specificity. FIG. 30B. Targeting pandemic/epidemic-causing pathogenic RNA virus species using PAC-MAN. FIG. 30C. Schematic of 10 RNA virus families that target different organs and systems in the human host. FIG. 30D. A diagram showing the minimal number of crRNAs needed to target all sequenced human-infectious strains in each of 10 RNA virus families and HIV and IAV. FIG. 30E. A diagram showing the minimal number of crRNAs needed to target 90% of sequenced human-infectious strains in each of 10 RNA virus families and HIV and IAV. FIG. 30F. A cumulative curve showing the predicted minimum number of crRNAs to target all human-infectious strains in 10 RNA virus families in FIG. 30C. FIG. 30G. Coverage of pathogenic RNA virus using the 14 crRNA minipool (SEQ ID NOs: 13651-13664). FIG. 30H. A cumulative curve showing the predicted minimum number of crRNAs to target livestock-infectious strains in 10 RNA virus families in FIG. 30C. Bovine, ovine, swine, feline, and canine viruses are included in the analysis.

[0112] FIG. 31 illustrates determinants of required crRNAs targeting broad-spectrum RNA virus families. FIG. 31A. Correlation between the number of strains in the RNA virus family and the number of crRNAs needed for targeting all human-infectious strains in that family. FIG. 31B. Correlation between the number of strains in the RNA virus family and the number of crRNAs needed for targeting all human- and animal-infectious strains in that family. FIG. 31C. A diagram showing the minimal number of crRNAs needed to target all sequenced human-infectious strains in each of 6 RNA virus families with segmented genomes. FIG. 31D. A diagram showing the minimal number of crRNAs needed to target 90% of sequenced human-infectious strains in each of 6 RNA virus families with segmented genomes. FIG. 31E. Correlation between the number of strains in the RNA virus family and the number of crRNAs needed for targeting all human viruses in 6 segment RNA virus families.

[0113] FIG. 32 illustrates COMBAT (COMputer-aided Broad-spectrum AnTiviral) as an online resource of using CRISPR-Cas13d for broad-spectrum antiviral targeting. FIG. 32A-C. An exemplary diagram showing the crRNAs designed to target SARS-CoV-2 and its alignment to the genes of SARS-CoV-2. These crRNAs are used for testing in FIG. 33. The intensity of shading for each crRNA represent its predicted crRNA score. Referring to FIG. 32D, an exemplary diagram showing the analysis of family-covering crRNAs targeting the Filoviridae family including Ebola virus.

[0114] FIG. 33 illustrates validation of predicted crRNAs for targeting SARS-CoV-2 sequences. FIG. 33A. Repression on SARS-CoV-2 GFP reporter using the first batch of crRNAs measured by flow cytometry. FIG. 33B. Correlation between predicted efficiency score and SARS-CoV-2 GFP repression efficiency for the first batch of crRNAs. FIG. 33C. Repression on SARS-CoV-2 reporter RNA abundance using the first batch of crRNAs measured by qPCR. FIG. 33D. Correlation between predicted efficiency score and RNA abundance repression efficiency for the first batch of crRNAs. FIG. 33E. Comparison of repression on SARS-CoV-2 GFP reporter (red) and predicted efficiency scores (pink) using the second batch of crRNAs. FIG. 33F. Correlation between predicted efficiency score and SARS-CoV-2 GFP repression efficiency for the second batch of crRNAs. FIG. 33G. Correlation between predicted efficiency score and SARS-CoV-2 GFP repression efficiency for combined first and second batches. FIG. 33H-I. Repression effects of the optimized minipool of crRNAs (crRNA-MP5) on SARS-CoV-2 GFP reporter (FIG. 33H) and RNA abundance (FIG. 33I). Referring to FIG. 33J, bar graphs show the percentage of genomes of SARS-CoV-2 isolates targeted by individual or multiple crRNAs in the optimized crRNA minipool.

[0115] FIG. 34 illustrates analysis of crRNAs targeting broad-spectrum RNA viruses relating to FIG. 30. Referring to FIG. 34A, coverage of each of 10 RNA virus families using a minipool of 14 crRNAs (SEQ ID NOs: 13651-13664). FIG. 34B. Cumulative curves showing the predicted minimum number of crRNAs to target livestock-infectious strains in 10 RNA virus families in.

[0116] FIG. 35 illustrates schematics of experimental systems and workflow used to validate crRNAs related to FIG. 33. Referring to FIG. 35A, the SARS-CoV-2 reporters used in this study. FIG. 35B. PAC-MAN expression system used in this study. FIG. 35C. Workflow for quantifying all individual or combinatorial crRNAs for targeting SARS-CoV-2 sequences.

[0117] The novel features of the disclosure are set forth with particularity in the appended claims. A better understanding of the features and advantages of the present disclosure will be obtained by reference to the following detailed description that sets forth illustrative embodiments.

### DETAILED DESCRIPTION

[0118] While preferred embodiments of the present disclosure have been shown and described herein, it will be obvious to those skilled in the art that such embodiments are provided by way of example only. Numerous variations, changes, and substitutions will now occur to those skilled in the art without departing from the disclosure. It should be understood that various alternatives to the embodiments of the disclosure described herein can be employed in practicing the disclosure. It is intended that the following claims define the scope of the disclosure and that methods and structures within the scope of these claims and their equivalents be covered thereby.

[0119] Use of absolute or sequential terms, for example, “will,” “will not,” “shall,” “shall not,” “must,” “must not,” “first,” “initially,” “next,” “subsequently,” “before,” “after,” “lastly,” and “finally,” are not meant to limit scope of the present embodiments disclosed herein but as exemplary.

[0120] As used herein, the singular forms “a”, “an” and “the” are intended to include the plural forms as well, unless the context clearly indicates otherwise. Furthermore, to the extent that the terms “including”, “includes”, “having”, “has”, “with”, or variants thereof are used in either the detailed description and/or the claims, such terms are intended to be inclusive in a manner similar to the term “comprising.”

[0121] As used herein, the phrases “at least one”, “one or more”, and “and/or” are open-ended expressions that are both conjunctive and disjunctive in operation. For example, each of the expressions “at least one of A, B and C”, “at least one of A, B, or C”, “one or more of A, B, and C”, “one or more of A, B, or C” and “A, B, and/or C” means A alone, B alone, C alone, A and B together, A and C together, B and C together, or A, B and C together.

[0122] Any systems, methods, software, systems, systems, and platforms described herein are modular and not limited to sequential steps. Accordingly, terms such as “first” and “second” do not necessarily imply priority, order of importance, or order of acts.

[0123] The term “about” or “approximately” means within an acceptable error range for the particular value as determined by one of ordinary skill in the art, which will depend in part on how the value is measured or determined, e.g., the limitations of the measurement system. For example, “about” can mean within 1 or more than 1 standard deviation, per the practice in the given value. Where particular values are described in the application and claims, unless otherwise stated the term “about” should be assumed to mean an acceptable error range for the particular value.

[0124] The terms “increased,” or “increase” are used herein to generally mean an increase by a statically significant amount. In some embodiments, the terms “increased,” or “increase,” mean an increase of at least 10% as compared to a reference level, for example an increase of at least about 10%, at least about 20%, or at least about 30%, or at least about 40%, or at least about 50%, or at least about 60%, or at least about 70%, or at least about 80%, or at least about 90% or up to and including a 100% increase or any increase between 10%-100% as compared to a reference level, standard, or control. Other examples of “increase” include an increase of at least 2-fold, at least 5-fold, at least 10-fold, at least 20-fold, at least 50-fold, at least 100-fold, at least 1000-fold or more as compared to a reference level.

[0125] The terms, “decreased” or “decrease” are used herein generally to mean a decrease by a statistically significant amount. In some embodiments, “decreased” or “decrease” means a reduction by at least 10% as compared to a reference level, for example a decrease by at least about 20%, or at least about 30%, or at least about 40%, or at least about 50%, or at least about 60%, or at least about 70%, or at least about 80%, or at least about 90% or up to and including a 100% decrease (e.g., absent level or non-detectable level as compared to a reference level), or any decrease between 10%-100% as compared to a reference level. In the context of a marker or symptom, by these terms is meant a statistically significant decrease in such level. The decrease can be, for example, at least 10%, at least 20%, at least 30%, at least 40% or more, and is preferably down to a level accepted as within the range of normal for an individual without a given disease.

[0126] The terms “patient” or “subject” are used interchangeably herein, and encompass mammals. Non-limiting examples of mammal include, any member of the mammalian class: humans, non-human primates such as chimpanzees, and other apes and monkey species; farm animals such as cattle, horses, sheep, goats, swine; domestic animals such as rabbits, dogs, and cats; laboratory animals including rodents, such as rats, mice and guinea pigs, and the like. In one aspect, the mammal is a human. The term “animal” as used herein comprises human beings and non-human animals. In one embodiment, a “non-human animal” is a mammal, for example a rodent such as rat or a mouse.

[0127] As used herein, a “cell” generally refers to a biological cell. A cell can be the basic structural, functional and/or biological unit of a living organism. A cell can originate from any organism having one or more cells. Some non-limiting examples include: a prokaryotic cell, eukaryotic cell, a bacterial cell, an archaeal cell, a cell of a single-cell eukaryotic organism, a protozoa cell, a cell from a plant (e.g. cells from plant crops, fruits, vegetables, grains, soy bean, corn, maize, wheat, seeds, tomatoes, rice, cassava, sugarcane, pumpkin, hay, potatoes, cotton, cannabis, tobacco, flowering plants, conifers, gymnosperms, ferns, clubmosses, hornworts, liverworts, mosses), an algal cell, (e.g., Botryococcus braunii, Chlamydomonas reinhardtii, Nannochloropsis gaditana, Chlorella pyrenoidosa, Sargassum patens C. Agardh, and the like), seaweeds (e.g. kelp), a fungal cell (e.g., a yeast cell, a cell from a mushroom), an animal cell, a cell from an invertebrate animal (e.g. fruit fly, cnidarian, echinoderm, nematode, etc.), a cell from a vertebrate animal (e.g., fish, amphibian, reptile, bird, mammal), a cell from a mammal (e.g., a pig, a cow, a goat, a sheep, a rodent, a rat, a mouse, a non-human primate, a human, etc.), and etcetera. Sometimes a cell is not originating from a natural organism (e.g. a cell can be a synthetically made, sometimes termed an artificial cell).

[0128] As used herein, the term “influenza virus” generally refers to an RNA virus that is a member of the Orthomyxoviruses family. In some embodiments, the influenza virus is selected from the genera consisting of Influenza virus A, Influenza virus B, Influenza virus C and Influenza virus D. In further embodiments, the influenza A virus is of the subtype H1N1, H2N2, H3N2, H5N1, H7N7, H1N2, H9N2, H7N2, H7N3, H10N7, H7N9, or H6N1. In further embodiments, the influenza B virus of the B/Yamagata/16/88-like lineage or the B/Victoria/2/87-like lineage.” In some embodiments, the influenza can be any strain of the influenza virus or any serotypes within a stain of influenza virus. In some cases, the influenza virus can comprise any combination viral surface glycoproteins haemagglutinin (H or HA) and neuraminidase (N or NA).

[0129] The term “nucleotide,” as used herein, generally refers to a base-sugar-phosphate combination. A nucleotide can comprise a synthetic nucleotide. A nucleotide can comprise a synthetic nucleotide analog. Nucleotides can be monomeric units of a nucleic acid sequence (e.g. deoxyribonucleic acid (DNA) and ribonucleic acid (RNA)). The term nucleotide can include ribonucleoside triphosphates adenosine triphosphate (ATP), uridine triphosphate (UTP), cytosine triphosphate (CTP), guanosine triphosphate (GTP) and deoxyribonucleoside triphosphates such as dATP, dCTP, dITP, dUTP, dGTP, dTTP, or derivatives thereof. Such derivatives can include, for example, [αS]dATP, 7-deaza-dGTP and 7-deaza-dATP, and nucleotide derivatives that confer nuclease resistance on the nucleic acid molecule containing them. The term nucleotide as used herein can refer to dideoxyribonucleoside triphosphates (ddNTPs) and their derivatives. Illustrative examples of dideoxyribonucleoside triphosphates can include, but are not limited to, ddATP, ddCTP, ddGTP, ddiTP, and ddTTP. A nucleotide can be unlabeled or detectably labeled by well-known techniques. Labeling can also be carried out with quantum dots. Detectable labels can include, for example, radioactive isotopes, fluorescent labels, chemiluminescent labels, bioluminescent labels and enzyme labels. Fluorescent labels of nucleotides can include but are not limited fluorescein, 5-carboxyfluorescein (FAM), 2′7′-dimethoxy-4′5-dichloro-6-carboxyfluorescein (JOE), rhodamine, 6-carboxyrhodamine (R6G), N,N,N′,N′-tetramethyl-6-carboxyrhodamine (TAMRA), 6-carboxy-X-rhodamine (ROX), 4-(4′dimethylaminophenylazo) benzoic acid (DABCYL), Cascade Blue, Oregon Green, Texas Red, Cyanine and 5-(2′-aminoethyl)aminonaphthalene-1-sulfonic acid (EDANS). Specific examples of fluorescently labeled nucleotides can include [R6G]dUTP, [TAMRA]dUTP, [R110]dCTP, [R6G]dCTP, [TAMRA]dCTP, [JOE]ddATP, [R6G]ddATP, [FAM]ddCTP, [R110]ddCTP, [TAMRA]ddGTP, [ROX]ddTTP, [dR6G]ddATP, [dR110]ddCTP, [dTAMRA]ddGTP, and [dROX]ddTTP available from Perkin Elmer, Foster City, Calif: FluoroLink DeoxyNucleotides, FluoroLink Cy3-dCTP, FluoroLink Cy5-dCTP, FluoroLink Fluor X-dCTP, FluoroLink Cy3-dUTP, and FluoroLink Cy5-dUTP available from Amersham, Arlington Heights, Ill.; Fluorescein-15-dATP, Fluorescein-12-dUTP, Tetramethyl-rodamine-6-dUTP, IR770-9-dATP, Fluorescein-12-ddUTP, Fluorescein-12-UTP, and Fluorescein-15-2′-dATP available from Boehringer Mannheim, Indianapolis, Ind.; and Chromosome Labeled Nucleotides, BODIPY-FL-14-UTP, BODIPY-FL-4-UTP. BODIPY-TMR-14-UTP, BODIPY-TMR-14-dUTP, BODIPY-TR-14-UTP, BODIPY-TR-14-dUTP, Cascade Blue-7-UTP, Cascade Blue-7-dUTP, fluorescein-12-UTP, fluorescein-12-dUTP, Oregon Green 488-5-dUTP, Rhodamine Green-5-UTP, Rhodamine Green-5-dUTP, tetramethylrhodamine-6-UTP, tetramethylrhodamine-6-dUTP, Texas Red-5-UTP. Texas Red-5-dUTP, and Texas Red-12-dUTP available from Molecular Probes, Eugene, Oreg. Nucleotides can also be labeled or marked by chemical modification. A chemically-modified single nucleotide can be biotin-dNTP. Some non-limiting examples of biotinylated dNTPs can include, biotin-dATP (e.g., bio-N6-ddATP, biotin-14-dATP), biotin-dCTP (e.g., biotin-11-dCTP, biotin-14-dCTP), and biotin-dUTP (e.g. biotin-11-dUTP, biotin-16-dUTP, biotin-20-dUTP).

[0130] The terms “polynucleotide,” “oligonucleotide,” and “nucleic acid” are used interchangeably to refer to a polymeric form of nucleotides of any length, either deoxyribonucleotides or ribonucleotides, or analogs thereof, either in single-, double-, or multi-stranded form. A polynucleotide can be exogenous or endogenous to a cell. A polynucleotide can exist in a cell-free environment. A polynucleotide can be a gene or fragment thereof. A polynucleotide can be DNA. A polynucleotide can be RNA. A polynucleotide can have any three dimensional structure, and can perform any function, known or unknown. A polynucleotide can comprise one or more analogs (e.g. altered backbone, sugar, or nucleobase). If present, modifications to the nucleotide structure can be imparted before or after assembly of the polymer. Some non-limiting examples of analogs include: 5-bromouracil, peptide nucleic acid, xeno nucleic acid, morpholinos, locked nucleic acids, glycol nucleic acids, threose nucleic acids, dideoxynucleotides, cordycepin, 7-deaza-GTP, fluorophores (e.g. rhodanine or fluorescein linked to the sugar), thiol containing nucleotides, biotin linked nucleotides, fluorescent base analogs, CpG islands, methyl-7-guanosine, methylated nucleotides, inosine, thiouridine, pseudourdine, dihydrouridine, queuosine, and wyosine. Non-limiting examples of polynucleotides include coding or non-coding regions of a gene or gene fragment, loci (locus) defined from linkage analysis, exons, introns, messenger RNA (mRNA), transfer RNA (tRNA), ribosomal RNA (rRNA), short interfering RNA (siRNA), short-hairpin RNA (shRNA), micro-RNA (miRNA), antisense oligonucleotide (ODN), ribozymes, cDNA, recombinant polynucleotides, branched polynucleotides, plasmids, vectors, isolated DNA of any sequence, isolated RNA of any sequence, cell-free polynucleotides including cell-free DNA (cfDNA) and cell-free RNA (cfRNA), nucleic acid probes, and primers. The sequence of nucleotides can be interrupted by non-nucleotide components.

[0131] The terms “transfection” or “transfected” generally refers to introduction of a nucleic acid into a cell by non-viral or viral-based methods. The nucleic acid molecules can be gene sequences encoding complete proteins or functional portions thereof.

[0132] The term “gene,” as used herein, refers to a segment of nucleic acid that encodes an individual protein or RNA (also referred to as a “coding sequence” or “coding region”), optionally together with associated regulatory region such as promoter, operator, terminator and the like, which can be located upstream or downstream of the coding sequence. The term “gene” is to be interpreted broadly, and can encompass mRNA, cDNA, cRNA and genomic DNA forms of a gene. In some uses, the term “gene” encompasses the transcribed sequences, including 5′ and 3′ untranslated regions (5′-UTR and 3′-UTR), exons and introns. In some genes, the transcribed region will contain “open reading frames” that encode polypeptides. In some uses of the term, a “gene” comprises only the coding sequences (e.g., an “open reading frame” or “coding region”) necessary for encoding a polypeptide. In some aspects, genes do not encode a polypeptide, for example, ribosomal RNA genes (rRNA) and transfer RNA (tRNA) genes. In some aspects, the term “gene” includes not only the transcribed sequences, but in addition, also includes non-transcribed regions including upstream and downstream regulatory regions, enhancers and promoters. The term “gene” can encompass mRNA, cDNA and genomic forms of a gene.

[0133] The term “mutation,” as used herein, can refer to a substitution of a residue within a sequence, e.g., a nucleic acid or amino acid sequence, with another residue, or a deletion or insertion of one or more residues within a sequence. One or more mutations can be described by identifying the original residue followed by the position of the residue within the sequence and by the identity of the newly substituted residue. Mutation can be a change or alteration in a sequence (e.g., nucleic acid sequence, genomic sequence, genetic sequence such as DNA. RNA, or protein sequence) relative to a reference sequence. The reference sequence can be a wild-type sequence, a sequence of a healthy or normal cell, or a sequence that is not associated with a disease or a disorder. A reference sequence can be a sequence not associated with a cancer. Non-limiting examples of mutations include point mutations, substitution of one or more nucleotides, deletion of one or more nucleotides, insertion of one or more nucleotides, fusion of one or more nucleotides, frame shift mutation, aberration, alternative splicing, abnormal methylation, missense mutation, conservative mutation, non-conservative mutation, nonsense mutation, splice variant, alternative splice variant, transition, transversion, de novo mutation, deleterious mutation, disease-causing mutation, epimutation, founder mutation, germline mutation, somatic mutation, predisposing mutation, splice-site mutation, or susceptibility gene mutation. The mutation can be a pathogenic variant or mutation that increases an individual's susceptibility or predisposition to a certain disease or disorder. The mutation can be a driver mutation (e.g., a mutation that can confer a fitness advantage to cells in their microenvironment, thereby driving the cell lineage to cancer). The driver mutation can be a lost function mutation. The mutation can be a lost function mutation. The mutation can be a passenger mutation (e.g., a mutation that occurs in a genome with the driver mutation and can be associated with clonal expansion). As used herein, the term “gene” can refer to a combination of polynucleotide elements, that when operatively linked in either a native or recombinant manner, provide some product or function.

[0134] As used herein, the terms “polypeptide,” “peptide” and “protein” can be used interchangeably herein in reference to a polymer of amino acid residues. A protein can refer to a full-length polypeptide as translated from a coding open reading frame, or as processed to its mature form, while a polypeptide or peptide can refer to a degradation fragment or a processing fragment of a protein that nonetheless uniquely or identifiably maps to a particular protein. A polypeptide can be a single linear polymer chain of amino acids bonded together by peptide bonds between the carboxyl and amino groups of adjacent amino acid residues. Polypeptides can be modified, for example, by the addition of carbohydrate, phosphorylation, etc. Proteins can comprise one or more polypeptides.

[0135] As used herein, the terms “fragment,” or equivalent terms can refer to a portion of a protein that has less than the full length of the protein and optionally maintains the function of the protein. Further, when the portion of the protein is blasted against the protein, the portion of the protein sequence can align, for example, at least with 80% identity to a part of the protein sequence.

[0136] The term “target polynucleotide”, “target viral genome”, or “target viral gene” as used herein can refer to a nucleic acid or polynucleotide which is targeted by the heterologous RNA polynucleotide and the gene regulating moiety of the present disclosure. A target polynucleotide can be DNA (e.g., endogenous or exogenous), for example, a DNA that can serve as a template to generate mRNA transcripts and/or the various regulatory regions which regulate transcription of an mRNA from a DNA template. A target polynucleotide can be a portion of a larger polynucleotide, for example a chromosome or a region of a chromosome. A target polynucleotide can be RNA. RNA can be, for example, mRNA which can serve as template encoding for a protein. A target polynucleotide comprising RNA can include or be within the various regulatory regions which regulate translation of protein from an mRNA template. A target polynucleotide can encode for a gene product (e.g., DNA encoding for an RNA transcript or RNA encoding for a protein product) or comprise a regulatory sequence which regulates expression of a gene product. Target polynucleotide can refer to a nucleic acid sequence on a single strand of a target nucleic acid. The target polynucleotide can be a portion of a gene, a regulatory sequence, genomic DNA, cell free nucleic acid including cfDNA and/or cfRNA, cDNA, a fusion gene, and RNA including mRNA, miRNA, rRNA, and others. A target polynucleotide, when targeted by a gene regulating moiety, can result in altered gene expression (e.g., increased transcription or translation of a mutated gene) and/or activity. A target polynucleotide can comprise a nucleic acid sequence that cannot be related to any other sequence in a nucleic acid sample by a single nucleotide substitution. A target polynucleotide can comprise or can be a portion of a gene sequence or a regulatory element thereof. A target polynucleotide can comprise or can be a portion of an exon sequence, an intron sequence, an exon-intron junction, splice acceptor-splice donor site, a start codon sequence, a stop codon sequence, a promoter site, an alternative promoter site, 5′ regulatory element, enhancer, 5′ UTR region, 3′ UTR region, poly adenylation site, or binding site of a polymerase, nuclease, gyrase, topoisomerase, methylase or methyl transferase, transcription factors, enhancer, or zinc finger. A target polynucleotide can comprise or be a portion of a splice variant or an alternative splice variant. A target polynucleotide can be present only in a cell to be targeted (e.g., a cancer cell, a diseased cell, cell infected with a microbe such as a virus or bacteria) and can be absent from normal or healthy cells. A target polynucleotide can comprise or be a portion of a microorganism or a microbe, such as a virus or a bacteria. A target polynucleotide can comprise or be a portion of a variant polynucleotide, for example, splice-site variant, point variant, pathogenic variant, unclassified variant, copy number variant, de novo variant, epigenetic variant, founder variant, frameshift variant, germline variant, somatic variant, missense variant, nonsense variant, or a pathogenic variant. A target polynucleotide can comprise or be a portion of an alternative splice variant resulting from a driver mutation.

[0137] The term “non-coding region” as used herein generally refers to a polynucleotide sequence (e.g., DNA sequence, RNA sequence) that is ultimately not translated into an amino acid sequence (e.g., a polypeptide). The non-coding region may not encode a polypeptide (e.g., a protein). For example, the non-coding region may be an intergenic region or an intronic region of a genetic sequence. In some cases, the target viral genome segment as disclosed herein may comprise at least one non-coding region (e.g., at least 1, 2, 3, 4, 5, or more non-coding regions) of a viral genome segment (e.g., influenza viral genome segment) that encodes one or more members selected from the group consisting of neuraminidase (NA), hemagglutinin (HA), and hemagglutinin-esterase-fusion (HEF). In some cases, the target viral genome segment as disclosed herein may comprise at least one non-coding region (e.g., at least 1, 2, 3, 4, 5, or more non-coding regions) of genome segments IV or VI, of influenza A or B. In some cases, the target viral genome segment as disclosed herein may comprise at least one non-coding region (e.g., at least 1, 2, 3, 4, 5, or more non-coding regions) of genome segments IV, of influenza C or D. In some cases, the target viral genome segment as disclosed herein may comprise at least one non-coding region (e.g., at least 1, 2, 3, 4, 5, or more non-coding regions) of a viral genome segment (e.g., influenza viral genome segment) that does not encode one or more members selected from the group consisting of polymerase basic protein 1 (PB1), polymerase basic protein 2 (PB2), polymerase acidic protein (PA), nucleocapsid protein (NP), matrix protein (M), and a non-structural protein (NS).

[0138] The terms “complement,” “complements,” “complementary,” and “complementarity.” as used herein, generally refer to a sequence that is fully complementary to and hybridizable to the given sequence. In some cases, a sequence hybridized with a given nucleic acid is referred to as the “complement” or “reverse-complement” of the given molecule if its sequence of bases over a given region is capable of complementarily binding those of its binding partner, such that, for example, A-T, A-U, G-C, and G-U base pairs are formed. In general, a first sequence that is hybridizable to a second sequence is specifically or selectively hybridizable to the second sequence, such that hybridization to the second sequence or set of second sequences is preferred (e.g. thermodynamically more stable under a given set of conditions, such as stringent conditions commonly used in the art) to hybridization with non-target sequences during a hybridization reaction. Typically, hybridizable sequences share a degree of sequence complementarity over all or a portion of their respective lengths, such as between 25%-100% complementarity, including at least 25%, 30%, 35%, 40%, 45%, 50%, 55%, 60%, 65%, 70%, 75%, 80%, 85%, 90%, 91%, 92%, 93%, 94%, 95%, 96%, 97%, 98%, 99%, and 100% sequence complementarity. Sequence identity, such as for the purpose of assessing percent complementarity, can be measured by any suitable alignment algorithm, including but not limited to the Needleman-Wunsch algorithm (see e.g. the EMBOSS Needle aligner available at www.ebi.ac.uk/Tools/psa/emboss_needle/nucleotide.html, optionally with default settings), the BLAST algorithm (see e.g. the BLAST alignment tool available at blast.ncbi.nlm.nih.gov/Blast.cgi, optionally with default settings), or the Smith-Waterman algorithm (see e.g. the EMBOSS Water aligner available at www.ebi.ac.uk/Tools/psa/emboss_water/nucleotide.html, optionally with default settings). Optimal alignment can be assessed using any suitable parameters of a chosen algorithm, including default parameters.

[0139] The term “percent (%) identity,” as used herein, generally refers to the percentage of amino acid (or nucleic acid) residues of a candidate sequence that are identical to the amino acid (or nucleic acid) residues of a reference sequence after aligning the sequences and introducing gaps, if necessary, to achieve the maximum percent identity (i.e., gaps can be introduced in one or both of the candidate and reference sequences for optimal alignment and non-homologous sequences can be disregarded for comparison purposes). Alignment, for purposes of determining percent identity, can be achieved in various ways that are within the skill in the art, for instance, using publicly available computer software such as BLAST, ALIGN, or Megalign (DNASTAR) software. Percent identity of two sequences can be calculated by aligning a test sequence with a comparison sequence using BLAST, determining the number of amino acids or nucleotides in the aligned test sequence that are identical to amino acids or nucleotides in the same position of the comparison sequence, and dividing the number of identical amino acids or nucleotides by the number of amino acids or nucleotides in the comparison sequence.

[0140] The term “mismatch” generally refers to lack of complementarity between two nucleotides when aligned. Complementary bases in DNA are A-T and G-C. Complementary bases in RNA are A-U and G-C. Thus a mismatch occurs when two oligonucleotide sequences are aligned and at one or more nucleotide positions that an A is not paired with T or a G is not paired with C in DNA or an A is not paired with U or a G is not paired with C in RNA.

[0141] As used herein, the term “in vivo” can be used to describe an event that takes place in a subject's body.

[0142] As used herein, the term “ex vivo” can be used to describe an event that takes place outside of a subject's body. An “ex vivo” assay cannot be performed on a subject. Rather, it can be performed upon a sample separate from a subject. Ex vivo can be used to describe an event occurring in an intact cell outside a subject's body.

[0143] As used herein, the term “in vitro” can be used to describe an event that takes places contained in a container for holding laboratory reagent such that it is separated from the living biological source organism from which the material is obtained. In vitro assays can encompass cell-based assays in which cells alive or dead are employed. In vitro assays can also encompass a cell-free assay in which no intact cells are employed.

[0144] “Treating” or “treatment” can refer to both therapeutic treatment and prophylactic or preventative measures, wherein the object is to prevent or slow down (lessen) a targeted pathologic condition or disorder. Those in need of treatment include those already with the disorder, as well as those prone to have the disorder, or those in whom the disorder is to be prevented. A therapeutic benefit can refer to eradication or amelioration of symptoms or of an underlying disorder being treated. Also, a therapeutic benefit can be achieved with the eradication or amelioration of one or more of the physiological symptoms associated with the underlying disorder such that an improvement is observed in the subject, notwithstanding that the subject can still be afflicted with the underlying disorder. A prophylactic effect can include delaying, preventing, or eliminating the appearance of a disease or condition, delaying or eliminating the onset of symptoms of a disease or condition, slowing, halting, or reversing the progression of a disease or condition, or any combination thereof. For prophylactic benefit, a subject at risk of developing a particular disease, or to a subject reporting one or more of the physiological symptoms of a disease can undergo treatment, even though a diagnosis of this disease cannot have been made.

[0145] The term “effective amount” and “therapeutically effective amount,” as used interchangeably herein, generally refer to the quantity of a system, for example a system comprising immune cells such as lymphocytes (e.g., T lymphocytes and/or NK cells) comprising a system of the present disclosure, that is sufficient to result in a desired activity upon administration to a subject in need thereof. Within the context of the present disclosure, the term “therapeutically effective” refers to that quantity of a system that is sufficient to delay the manifestation, arrest the progression, relieve or alleviate at least one symptom of a disorder treated by the methods of the present disclosure.

[0146] The term “viral infection” generally refers to any stage of an infection by a virus in a host (e.g., a cell, an animal, a human, etc.), including, but not limited to, attachment of the virus to a cell, penetration of the virus to the cell (e.g., fusion of the virus to the cell membrane, uncoating of the virus), uncoating of capsid of the virus, replication (e.g., transcription or reverse transcription of the viral genome, translation of the viral genome or a derivative thereof, viral particle assembly), and lysis (e.g., release of new viral particles from the cell). The term viral infection can also refer to any period of viral infection, including, but not limited to incubation phase, latent phase, dormant phase, acute phase, and development and maintenance of immunity towards a virus.

[0147] A change (e.g., reduction) in viral infection in a cell or an organism cam be determined by one or more assays including, but not limited to, microscopy (e.g., transmission electron microscopy (TEM), light microscopy, fluorescence microscopy using one or more antibodies against a viral antigen), detection of viral genetic material or a derivative thereof (e.g., via polymerase chain reaction (PCR), quantitative PCR, loop-mediated amplification (LAMP), next generation sequencing (NGS), western blotting, flow cytometry), quantitative virus assays (e.g., plaque assay, focus forming assay (FFA), 50% Tissue Culture Infective Dose (TCDi50) assay, hemagglutination assay and hemagglutination inhibition Assay (HIA), enzyme-linked immunosorbent assay (ELISA), homogeneous assay), etc.

[0148] The term “pharmaceutically acceptable carrier,” “pharmaceutically acceptable excipient,” “physiologically acceptable carrier,” or “physiologically acceptable excipient” refers to a pharmaceutically-acceptable material, system, or vehicle, such as a liquid or solid filler, diluent, excipient, solvent, or encapsulating material. A component can be “pharmaceutically acceptable” in the sense of being compatible with the other ingredients of a pharmaceutical formulation. It can also be suitable for use in contact with the tissue or organ of humans and animals without excessive toxicity, irritation, allergic response, immunogenicity, or other problems or complications, commensurate with a reasonable benefit/risk ratio.

[0149] The term “pharmaceutical composition” refers to a mixture of a compound disclosed herein with other chemical components, such as diluents or carriers. The pharmaceutical composition can facilitate administration of the compound to an organism. Multiple techniques of administering a compound exist in the art including, but not limited to, oral, injection, aerosol, parenteral, and topical administration.

### 1. Overview

[0150] Aspects of the present disclosure provides a system for reducing viral infection in a cell. In some embodiments, the system can comprise one or more therapeutic agents (e.g., at least 1, 2, 3, 4, 5, or more different therapeutic agents). In some embodiments, the system can comprise a therapeutic agent comprising (i) a heterologous polypeptide comprising a gene regulating moiety or (ii) a heterologous nucleic acid molecule. In some embodiments, at least the gene regulating moiety or the one or more heterologous nucleic acid molecules can be configured to specifically bind at least a portion of one or more target viral genes of one or more viruses in the cell, to reduce expression or activity of the one or more target viral genes of the one or more viruses in the cell. Alternatively or in addition to, the system can comprise a therapeutic agent comprising an agent that reduces viral infection in the cell by one or more mechanisms other than binding a target viral gene.

[0151] In some embodiments, the system as disclosed herein can comprise only one of (i) heterologous polypeptide comprising the gene regulating moiety and (ii) the heterologous nucleic acid molecule. In alternative embodiments, the system can comprise both (i) the heterologous polypeptide comprising the gene regulating moiety and (ii) the heterologous nucleic acid molecule. In some cases, (i) the heterologous polypeptide comprising the gene regulating moiety (e.g., non-CRISPR/Cas endonucleases, such as TALEN, ZFN, etc.) and (ii) the heterologous nucleic acid molecule (e.g., silencing nucleic acid molecules) can function independently of one another. In some cases, (i) the heterologous polypeptide comprising the gene regulating moiety (e.g., a CRISPR/Cas endonuclease or a variant thereof) and (ii) the heterologous nucleic acid molecule (e.g., a guide nucleic acid molecule, such as a small guide RNA) can exhibit functions that dependent on each other, e.g., by forming a complex (e.g., CRISPR/Cas-guide RNA complex).

[0152] Additional aspects of the present disclosure provides compositions, kits, or reaction mixtures that comprise or are derived from any one of the systems provided herein. Additional aspects of the present disclosure provides methods for reducing viral infection in a cell by utilizing any one of the systems, compositions, kits, or reaction mixtures provided herein.

[0153] In some embodiments, the reducing expression or activity of the one or more target viral genes in the cell contacted with the system described herein is determined by comparing with a corresponding control cell infected with the same strain or strains of virus infecting the cell contacted with the system. In some embodiments, the corresponding control comprises a corresponding control cell. In some embodiments, the corresponding control cell and the cell being treated are infected by the same strain or strains of virus. In some embodiments, the corresponding control cell is a cell comprising a non-functional gene regulating moiety; a cell lacking a heterologous nucleic acid molecule (e.g., no sgRNA); a cell comprising a control heterologous nucleic acid molecule (e.g., a control sgRNA that does not bind a target polynucleotide sequence of interest); or a cell comprising a reduced number of heterologous nucleic acid molecules (e.g., a fewer number of sgRNAs), in cases where a pool of different guide nucleic acid molecules was used to reduce viral infection.

### II. Systems, Compositions, and Methods for Reducing Viral Infection

[0154] In an aspect, the present disclosure provides a system for reducing viral infection in a cell. The system can regulate (e.g., reduce) expression or activity of one or more target viral genes in a cell. The system can comprise a heterologous polypeptide comprising a gene regulating moiety, wherein the gene regulating moiety can be configured to bind one or more target viral genes in the cell, to reduce the expression or activity of the one or more target viral genes. Alternatively or in addition to, the system can comprise at least one heterologous nucleic acid molecule (e.g., at least one heterologous RNA polynucleotide) configured to bind the one or more target viral genes in the cell, to reduce the expression or activity of the one or more target viral genes. In some cases, the one or more target viral genes can encode (i) a viral RNA-dependent RNA polymerase (RdRP) or a fragment thereof or (ii) a viral nucleocapsid protein (N-protein) or a fragment thereof. In some examples, the one or more target viral genes can encode (i) the viral RdRp or a fragment thereof and (ii) the viral N-protein or a fragment thereof.

[0155] In some embodiments of any one of the systems disclosed herein, a plurality of heterologous nucleic acid molecules (e.g., a plurality of different heterologous RNA molecules) can collectively exhibit specific binding to a threshold percentage (e.g., at least about 50%, 60%, 70%, 80%, 90%, or more) of different types of viruses (e.g., coronaviruses). In some cases, no more than six members of the heterologous RNA polynucleotide (e.g., crRNA or guide RNA) can collectively exhibit specific binding to at least 50% of different types of coronaviruses selected from the group consisting of: alphacoronavirus, betacoronavirus, deltacoronavirus, and gammacoronavirus.

[0156] In another aspect, the present disclosure provides a system for reducing viral infection in a cell (e.g., a population of cell. The system can comprise a heterologous polypeptide comprising a gene regulating moiety, wherein the gene regulating moiety can be configured to regulate (e.g., reduce) expression or activity of a target viral genome segment (e.g., one or more target viral genome segments) of a virus in the cell. Alternatively or in addition to, the system can comprise at least one heterologous nucleic acid molecule (e.g., at least one heterologous RNA molecule) configured to regulate (e.g., reduce) expression or activity of the target viral gene segment of the virus in the cell. In some embodiments, the target viral genome segment can comprise at least one non-coding region or a fragment thereof (e.g., at least 1, 2, 3, 4, 5, or more non-coding regions of fragments thereof).

[0157] In some embodiments of any one of the systems disclosed herein, the at least one heterologous nucleic acid molecule can comprise a plurality of heterologous nucleic acid molecule (e.g., a plurality of heterologous RNA polynucleotides) configured to bind a plurality of different portions of the target viral genome segment. In some cases, the plurality of nucleic acid molecule (e.g., the plurality of heterologous RNA polynucleotides) can comprises at least two, three, four, five, or six different RNA polynucleotides.

[0158] In some embodiments of any one of the systems disclosed herein, the target viral genome segment can be from an influenza virus, and the system can effect reduced transfection of the influenza virus in the cell (e.g., in the population of cells). In some embodiments, the at least one non-coding region is conserved across a plurality of influenza virus types selected from the group consisting of: influenza A, influenza B, influenza C, and influenza D. In some embodiments, the at least one non-coding region is conserved across a plurality of influenza subtypes.

[0159] In some embodiments one of the systems disclosed herein, the target viral genome segment can comprise a first non-coding region and a second non-coding region that is different from the first non-coding region. In some embodiments, the first and second non-coding regions can be operatively coupled to a same viral polypeptide. In some cases, a polynucleotide sequence encoding the same viral polypeptide or a fragment thereof can be flanked by the first and second non-coding regions. In some cases, the same viral polypeptide can be selected from the group consisting of: a neuraminidase and a hemagglutinin. In some cases, the same viral polypeptide can be the neuraminidase. In alternative embodiments, the first and second non-coding regions can be operatively coupled to different viral polypeptides. In some cases, the first viral polypeptide can be a neuraminidase and the second viral polypeptide can be selected from the group consisting of: a polymerase, a hemagglutinin, a nucleoprotein, a matrix protein, a non-structural protein, and a nuclear export protein.

[0160] In another aspect, the present disclosure provides a system for reducing viral infection in a cell. The system can comprise (1) a plurality of heterologous gene regulating moieties; or (2) a plurality of heterologous nucleic acid molecules. In some cases, the plurality of heterologous gene regulating moieties or the plurality of heterologous nucleic acid molecules can be configured to specifically bind a plurality of virus strains (e.g., a plurality of target viral genes or proteins of the plurality of virus strains, such as RNA virus strains). The term “strain” or “viral strain” can be used interchangeably throughout the present disclosure.

[0161] In some embodiments, the system can comprise only the plurality of heterologous gene regulating moieties (e.g., TALEN, ZFN, etc.). In some embodiments, the system can comprise only the plurality of heterologous nucleic acid molecules (e.g., silencing nucleic acids or inhibitory RNAs such as short interfering RNA (siRNA), short-hairpin RNA (shRNA), micro-RNA (miRNA), antisense oligonucleotide (ODN), etc). In some embodiments, the system can comprise both the plurality of heterologous gene regulating moieties and the plurality of heterologous nucleic acid molecules. In some cases, a first number of the plurality of heterologous gene regulating moieties and a second number of the plurality of heterologous nucleic acid molecules can be the same. Alternatively, the first number of the plurality of heterologous gene regulating moieties and the second number of the plurality of heterologous nucleic acid molecules can be different. For example, the first number can be greater than the second number. Alternatively, the first number can be less than the first number.

[0162] In some embodiments of any one of the systems disclosed herein, (i) a gene regulating moiety of the plurality of heterologous gene regulating moieties can be configured to form a complex (e.g., non-covalently complex) with (ii) a heterologous nucleic acid molecule of the plurality of plurality of heterologous nucleic acid molecules, and such complex can be configured to bind a virus strain (e.g., bind a target viral gene of the virus strain) of the plurality of virus strains. For example, the complex can be an endonuclease-guide nucleic acid complex, such as a CRISPR-Cas nuclease-guide RNA complex (e.g., Cas13d-sgRNA complex). As such, the plurality of heterologous gene regulating moieties and the plurality of plurality of heterologous nucleic acid molecules can form a plurality of complexes. The plurality of complexes collectively can be configured to specifically bind the plurality of virus strains (e.g., bind a plurality of target viral genes from the plurality of virus strains).

[0163] In some embodiments of any one of the systems disclosed herein, the plurality of heterologous gene regulating moieties of the system can comprise no more than 100 members, 95 members, 90 members, 85 members, 80 members, 75 members, 70 members, 65 members, 60 members, 55 members, 50 members, 45 members, 40 members, 35 members, 34 members, 33 members, 32 members, 31 members, 30 members, 29 members, 28 members, 27 members, 26 members, 25 members, 24 members, 23 members, 22 members, 21 members, 20 members, 19 members, 18 members, 17 members, 16 members, 15 members, 14 members, 13 members, 12 members, 11 members, 10 members, 9 members, 8 members, 7 members, 6 members, 5 members, 4 members, 3 members, or 2 members. In some cases, the plurality of heterologous gene regulating moieties can comprise between about 2 members and about 50 members, between about 2 members and about 45 members, between about 2 members and about 40 members, between about 2 members and about 35 members, between about 2 members and about 30 members, between about 5 members and about 30 members, between about 5 members and about 25 members, between about 10 members and about 20 members, between about 10 members and about 18 members, or between about 12 members and about 16 members. For example, the plurality of heterologous gene regulating moieties can comprise no more than about 14 members. The members of the plurality of heterologous gene regulating moieties can be different members (e.g., configured to bind to different target viral gene sequences or viral proteins).

[0164] In some embodiments of any one of the systems disclosed herein, a heterologous gene regulating moiety of the plurality of gene regulating moieties can exhibit a specific binding to a target polynucleotide sequence. The target polynucleotide sequence can have at least about 50%, 55%, 60%, 65%, 70%, 75%, 80%, 85%, 90%, 95%, 96%, 97%, 98%, 99%, or 100% sequence identity or complementarity to a sequence selected from SEQ ID NOs: 13651-13664 or SEQ ID NOs: 13671-13684.

[0165] In some embodiments of any one of the systems disclosed herein, the plurality of heterologous nucleic acid molecules can comprise no more than 100 members, 95 members, 90 members, 85 members, 80 members, 75 members, 70 members, 65 members, 60 members, 55 members, 50 members, 45 members, 40 members, 35 members, 34 members, 33 members, 32 members, 31 members, 30 members, 29 members, 28 members, 27 members, 26 members, 25 members, 24 members, 23 members, 22 members, 21 members, 20 members, 19 members, 18 members, 17 members, 16 members, 15 members, 14 members, 13 members, 12 members, 11 members, 10 members, 9 members, 8 members, 7 members, 6 members, 5 members, 4 members, 3 members, or 2 members. In some cases, the plurality of heterologous nucleic acid molecules can comprise between about 2 members and about 50 members, between about 2 members and about 45 members, between about 2 members and about 40 members, between about 2 members and about 35 members, between about 2 members and about 30 members, between about 5 members and about 30 members, between about 5 members and about 25 members, between about 10 members and about 20 members, between about 10 members and about 18 members, or between about 12 members and about 16 members. For example, the plurality of heterologous nucleic acid molecules can comprise no more than about 14 members. The members of the plurality of heterologous nucleic acid molecules can be different members (e.g., configured to bind to different target viral gene sequences or viral proteins).

[0166] In some embodiments of any one of the systems disclosed herein, a heterologous nucleic acid molecule of the plurality of nucleic acid molecules can exhibit a specific binding to a target polynucleotide sequence. The target polynucleotide sequence can have at least about 50%, 55%, 60%, 65%, 70%, 75%, 80%, 85%, 90%, 95%, 96%, 97%, 98%, 99%, or 100% sequence identity or complementarity to a sequence selected from SEQ ID NOs: 13651-13664 or SEQ ID NOs: 13671-13684.

[0167] In some embodiments of any one of the systems disclosed herein, the plurality of strains can comprise at least about 1,000 different strains, 2,000 different strains, 3,000 different strains, 4,000 different strains, 5,000 different strains, 6,000 different strains, 7,000 different strains, 8,000 different strains, 9,000 different strains, 10,000 different strains, 11,000 different strains, 12,000 different strains, 13,000 different strains, 14,000 different strains, 15,000 different strains, 16,000 different strains, 17,000 different strains, 18,000 different strains, 19,000 different strains, 20,000 different strains, 21,000 different strains, 22,000 different strains, 23,000 different strains, 24,000 different strains, 25,000 different strains, 30,000 different strains, 40,000 different strains, 50,000 different strains, or more. The plurality of strains can comprise at most about 50,000 different strains, 45,000 different strains, 40,000 different strains, 35,000 different strains, 30,000 different strains, 25,000 different strains, 24,000 different strains, 23,000 different strains, 22,000 different strains, 21,000 different strains, 20,000 different strains, 19,000 different strains, 18,000 different strains, 17,000 different strains, 16,000 different strains, 15,000 different strains, 14,000 different strains, 13,000 different strains, 12,000 different strains, 11,000 different strains, 10,000 different strains, 9,000 different strains, 8,000 different strains, 7,000 different strains, 6,000 different strains, 5,000 different strains, 4,000 different strains, 3,000 different strains, 2,000 different strains, 1,000 different strains, or less.

[0168] In some embodiments of any one of the systems disclosed herein, a plurality of viral genes from the plurality of strains can comprise at least about 1,000 viral genes, 2,000 viral genes, 3,000 viral genes, 4,000 viral genes, 5,000 viral genes, 6,000 viral genes, 7,000 viral genes, 8,000 viral genes, 9,000 viral genes, 10,000 viral genes, 11,000 viral genes, 12,000 viral genes, 13,000 viral genes, 14,000 viral genes, 15,000 viral genes, 16,000 viral genes, 17,000 viral genes, 18,000 viral genes, 19,000 viral genes, 20,000 viral genes, 21,000 viral genes, 22,000 viral genes, 23,000 viral genes, 24,000 viral genes, 25,000 viral genes, 30,000 viral genes, 40,000 viral genes, 50,000 viral genes, or more. The plurality of strains can comprise at most about 50,000 viral genes, 45,000 viral genes, 40,000 viral genes, 35,000 viral genes, 30,000 viral genes, 25,000 viral genes, 24,000 viral genes, 23,000 viral genes, 22,000 viral genes, 21,000 viral genes, 20,000 viral genes, 19,000 viral genes, 18,000 viral genes, 17,000 viral genes, 16,000 viral genes, 15,000 viral genes, 14,000 viral genes, 13,000 viral genes, 12,000 viral genes, 11,000 viral genes, 10,000 viral genes, 9,000 viral genes, 8,000 viral genes, 7,000 viral genes, 6,000 viral genes, 5,000 viral genes, 4,000 viral genes, 3,000 viral genes, 2,000 viral genes, 1,000 viral genes, or less.

[0169] In some embodiments of any one of the systems disclosed herein, a plurality of viral genes from the plurality of strains can comprise at least about 1,000 viral polynucleotide sequences, 2,000 viral polynucleotide sequences, 3,000 viral polynucleotide sequences, 4,000 viral polynucleotide sequences, 5,000 viral polynucleotide sequences, 6,000 viral polynucleotide sequences, 7,000 viral polynucleotide sequences, 8,000 viral polynucleotide sequences, 9,000 viral polynucleotide sequences, 10,000 viral polynucleotide sequences, 11,000 viral polynucleotide sequences, 12,000 viral polynucleotide sequences, 13,000 viral polynucleotide sequences, 14,000 viral polynucleotide sequences, 15,000 viral polynucleotide sequences, 16,000 viral polynucleotide sequences, 17,000 viral polynucleotide sequences, 18,000 viral polynucleotide sequences, 19,000 viral polynucleotide sequences, 20,000 viral polynucleotide sequences, 21,000 viral polynucleotide sequences, 22,000 viral polynucleotide sequences, 23,000 viral polynucleotide sequences, 24,000 viral polynucleotide sequences, 25,000 viral polynucleotide sequences, 30,000 viral polynucleotide sequences, 40,000 viral polynucleotide sequences, 50,000 viral polynucleotide sequences, or more. The plurality of strains can comprise at most about 50,000 viral polynucleotide sequences, 45,000 viral polynucleotide sequences, 40,000 viral polynucleotide sequences, 35,000 viral polynucleotide sequences, 30,000 viral polynucleotide sequences, 25,000 viral polynucleotide sequences, 24,000 viral polynucleotide sequences, 23,000 viral polynucleotide sequences, 22,000 viral polynucleotide sequences, 21,000 viral polynucleotide sequences, 20,000 viral polynucleotide sequences, 19,000 viral polynucleotide sequences, 18,000 viral polynucleotide sequences, 17,000 viral polynucleotide sequences, 16,000 viral polynucleotide sequences, 15,000 viral polynucleotide sequences, 14,000 viral polynucleotide sequences, 13,000 viral polynucleotide sequences, 12,000 viral polynucleotide sequences, 11,000 viral polynucleotide sequences, 10,000 viral polynucleotide sequences, 9,000 viral polynucleotide sequences, 8,000 viral polynucleotide sequences, 7,000 viral polynucleotide sequences, 6,000 viral polynucleotide sequences, 5,000 viral polynucleotide sequences, 4,000 viral polynucleotide sequences, 3,000 viral polynucleotide sequences, 2,000 viral polynucleotide sequences, 1,000 viral polynucleotide sequences, or less.

[0170] In some embodiments of any one of the systems disclosed herein, the plurality of virus strains can be from a plurality of virus families (e.g., a plurality of different reference viral strains from a plurality of different reference virus families, such as RNA virus families).

[0171] In some embodiments of any one of the systems disclosed herein, the plurality of heterologous gene regulating moieties or the plurality of heterologous nucleic acid molecules can be configured to specifically bind at least about 50%, at least about 55%, at least about 60%, at least about 65%, at least about 70%, at least about 75%, at least about 76%, at least about 77%, at least about 78%, at least about 79%, at least about 80%, at least about 81%, at least about 82%, at least about 83%, at least about 84%, at least about 85%, at least about 86%, at least about 87%, at least about 88%, at least about 89%, at least about 90%, at least about 91%, at least about 92%, at least about 93%, at least about 94%, at least about 95%, at least about 96%, at least about 97%, at least about 98%, or at least about 99% of the plurality of strains (e.g., a plurality of viral genes thereof) from the plurality of virus families (e.g., RNA virus families). The plurality of heterologous gene regulating moieties or the plurality of heterologous nucleic acid molecules can be configured to specifically bind between about 50% and about 99% of the plurality of strains from the plurality of virus families, between about 55% and about 99% of the plurality of strains from the plurality of virus families, between about 60% and about 99% of the plurality of strains from the plurality of virus families, between about 60% and about 95% of the plurality of strains from the plurality of virus families, between about 60% and about 95% of the plurality of strains from the plurality of virus families, between about 65% and about 95% of the plurality of strains from the plurality of virus families, between about 60% and about 95% of the plurality of strains from the plurality of virus families, between about 65% and about 95% of the plurality of strains from the plurality of virus families, between about 70% and about 95% of the plurality of strains from the plurality of virus families, between about 75% and about 95% of the plurality of strains from the plurality of virus families, or between about 80% and about 95% of the plurality of strains from the plurality of virus families.

[0172] In some embodiments of any one of the systems disclosed herein, the plurality of virus families can comprise a plurality of RNA virus families. In some cases, the plurality of RNA virus families can comprise two or more members (e.g., 2, 3, 4, 5, 6, 7, 8, 9, 10, 11, or 12 members) selected from the group consisting of Coronaviridae, Pneumoviridae, Paramyxoviridae, Caliciviridae, Hepeviridae, Picomaviridae, Filoviridae, Flaviviridae, Rhabdoviridae. Togaviridae, Orthomyxoviridae, and Retroviridae. In some cases, the plurality of RNA virus families can comprise two or more members (e.g., 2, 3, 4, 5, 6, 7, 8, 9, or 10 members) selected from the group consisting of Coronaviridae, Pneumoviridae, Paramyxoviridae, Caliciviridae, Hepeviridae, Picomaviridae, Filoviridae, Flaviviridae, Rhabdoviridae, and Togaviridae.

[0173] In some embodiments of any one of the systems disclosed herein, the plurality of virus strains can be from a single virus family of a plurality of virus families (e.g., from a single RNA virus family of a plurality of RNA virus families). In some embodiments, the plurality of heterologous gene regulating moieties or the plurality of heterologous nucleic acid molecules can be configured to specifically bind a plurality of strains from a single RNA virus family of a plurality of RNA virus families. In some embodiments, the plurality of heterologous gene regulating moieties or the plurality of heterologous nucleic acid molecules can be configured to specifically bind at least a threshold portion of a plurality of strains from each RNA virus family of a plurality of RNA virus families.

[0174] In some embodiments of any one of the systems disclosed herein, the plurality of strains from the each RNA virus family can comprise at least about 500 different strains, 1,000 different strains, 1,500 different strains, 2,000 different strains, 2,500 different strains, 3,000 different strains, 3,500 different strains, 4,000 different strains, 4,500 different strains, 5,000 different strains, 5,500 different strains, 6,000 different strains, 6,500 different strains, 7,000 different strains, 7,500 different strains, 8,000 different strains, 8,500 different strains, 9,000 different strains, 9,500 different strains, 10,000 different strains, 10,500 different strains, 1,000 different strains, 11,500 different strains, 12,000 different strains, 12,500 different strains, 13,000 different strains, 13,500 different strains, 14,000 different strains, 14,500 different strains, 15,000 different strains, or more. The plurality of strains from the each RNA virus family can comprise at most about 15,000 different strains, 14,500 different strains, 14,000 different strains, 13,500 different strains, 13,000 different strains, 12,500 different strains, 12,000 different strains, 11,500 different strains, 11,000 different strains, 10,500 different strains, 10,000 different strains, 9,500 different strains, 9,000 different strains, 8,500 different strains, 8,000 different strains, 7,500 different strains, 7,000 different strains, 6,500 different strains, 6,000 different strains, 5,500 different strains, 5,000 different strains, 4.500 different strains, 4,000 different strains, 3,500 different strains, 3,000 different strains, 2,500 different strains, 2,000 different strains, 1,500 different strains, 1,000 different strains, 500 different strains, or less.

[0175] In some embodiments of any one of the systems disclosed herein, a first number of a first plurality of strains from a first RNA virus family and a second number of a second plurality of strains from a second RNA virus family can be the same. Alternatively, the first number of the first plurality of strains from the first RNA virus family and the second number of the second plurality of strains from the second RNA virus family can be different.

[0176] In some embodiments of any one of the systems disclosed herein, the threshold portion of the plurality of strains from the each RNA virus family of the plurality of RNA virus families can be at least about 20%, 25%, 30%, 35%, 40%, 45%, 50%, 55%, 60%, 65%, 70%, 75%, 80%, 85%, 90%, or more. The threshold portion of the plurality of strains from the each RNA virus family of the plurality of RNA virus families can be at most about 90%, 85%, 80%, 75%, 70%, 65%, 60%, 55%, 50%, 45%, 40%, 35%, 30%, 25%, 20%, or less. In some cases, the threshold portion of the plurality of strains from the each RNA virus family of the plurality of RNA virus families can be between about 20% to about 60%, between about 25% to about 60%, between about 30% to about 60%, between about 35% to about 60%, between about 40% to about 60%, between about 45% to about 60%, or between about 50% to about 60%.

[0177] In some embodiments, the threshold portion of the plurality of strains from the each RNA virus family of the plurality of RNA virus families can be at least about 55%, 60%, 65%, 70%, 75%, 80%, 85%, 90%, or more. In some cases, the plurality of RNA virus families can comprise two or more members (e.g., 2, 3, 4, 5, 6, 7, or 8 members) selected from the group consisting of Coronaviridae, Pneumoviridae, Caliciviridae, Hepeviridae, Picornaviridae, Filoviridae, Flaviviridae, and Togaviridae.

[0178] In some embodiments, the threshold portion of the plurality of strains from the each RNA virus family of the plurality of RNA virus families can be at least about 70%, 75%, 80%, 85%, or more. In some cases, the plurality of RNA virus families can comprise two or more members (e.g., 2, 3, 4, 5, 6, or 7 members) selected from the group consisting of Coronaviridae, Pneumoviridae, Hepeviridae, Picomaviridae, Filoviridae, Flaviviridae, and Togaviridae.

[0179] In some embodiments of any one of the systems disclosed herein, the plurality of RNA virus families can be a plurality of human-infectious RNA virus families.

[0180] In some embodiments of any one of the systems disclosed herein, the heterologous polypeptide can comprise the gene regulating moiety that is operatively coupled to a nuclear localization signal (NLS) (gene regulating moiety-NLS). The term “NLS” or “nuclear localization domain (NLD)” can be used interchangeably throughout the present disclosure. The NLS can be heterologous to the gene regulating moiety. The gene regulating moiety can be coupled to the NLS via covalent or non-covalent interactions (e.g., via an additional molecule configured to bind the gene regulating moiety in one arm and the NLS in another arm). The NLS can be a polypeptide sequence or a functional variant thereof. The NLS can be capable of traversing a nuclear membrane, thereby entering the nucleus of a cell. Thus, the NLS can be capable of traversing the nuclear membrane with the gene regulating moiety, thereby assisting the gene regulating moiety to enter the nuclease of the cell.

[0181] In some embodiments of any one of the systems disclosed herein, the system for reducing viral infection in the cell can comprise both (i) the heterologous polypeptide comprising the gene regulating moiety that is operatively coupled to a nuclear localization signal (NLS) (gene regulating moiety-NLS) and (ii) a heterologous polynucleotide sequence encoding a guide nucleic acid molecule. Upon expression of the guide nucleic acid molecule from the heterologous polynucleotide sequence in the cell, the gene regulating moiety-NLS can form a complex with the guide nucleic acid molecule. The complex can be configured to bind a target viral gene, to reduce the viral infection in the cell. In some cases, the heterologous polypeptide or the heterologous polynucleotide sequence encoding the guide nucleic acid may not be integrated into a genome of the host cell. In some cases, the heterologous polypeptide and the heterologous polynucleotide sequence encoding the guide nucleic acid may not be integrated into a genome of the host cell. Without wishing to be bound by theory, the heterologous polynucleotide sequence may be transcribed to the guide nucleic acid molecule in the nuclease of the cell. For example, the heterologous polynucleotide sequence may be a viral vector (e.g., lentiviral vector) that is ultimately transcribed to the guide nucleic acid molecule in the nucleus of the cell. In another example, the heterologous polynucleotide sequence may not be a guide RNA nucleic acid molecule that is directly transfected into the cell.

[0182] In some embodiments of any one of the systems disclosed herein, the complex comprising the gene regulating moiety-NLS and the corresponding guide nucleic acid sequence can specifically bind a target viral gene, and the specific binding can effect reduction of the viral infection in the cell by at least about 5%, 10%, 15%, 20%, 25%, 30%, 35%, 40%, 45%, 50%, 55%, 60%, 65%, 70%, 80%, 90%, or more, as compared to a corresponding control. For example, the corresponding control can comprise a gene regulating moiety that is not operatively coupled to the NLS (e.g., a gene regulating moiety operatively coupled to a nuclear export signal (NES), a gene regulating moiety that is not operatively coupled to NLS or NES). In another example, the corresponding control can be the gene regulating moiety-NLS in absence of the guide nucleic acid sequence or in the presence of a control guide nucleic acid sequence that does not bind the target viral gene.

[0183] In some embodiments of any one of the systems disclosed herein, the heterologous polypeptide comprising the gene regulating moiety-NLS can be expressed in the cell (e.g., the host cell) via viral transduction of a transgene encoding at least the gene-regulating moiety-NLS. In some cases, a gene encoding the heterologous polypeptide comprising the gene regulating moiety-NLS may not be transfected into the cell (e.g., via cationic transfection agents).

[0184] In some embodiments of any one of the systems disclosed herein, the system can comprise (1) a first therapeutic agent configured to specifically bind a target viral gene and (2) a second therapeutic agent that does not specifically bind a viral gene. The first therapeutic agent can comprise (i) a heterologous polypeptide comprising a gene regulating moiety; or (ii) a heterologous nucleic acid molecule. In some cases, the first therapeutic agent and the second therapeutic agent can be different. In some cases, a combination of the first and second therapeutic agents can reduce viral infection in the cell, as compared to a corresponding control. In some embodiments, the corresponding control comprises a corresponding control cell. In some embodiments, the corresponding control cell and the cell being treated are infected by the same strain or strains of virus. In some embodiments, the corresponding control cell is a cell comprising a non-functional gene regulating moiety; a cell lacking a heterologous nucleic acid molecule (e.g., no sgRNA); a cell comprising a control heterologous nucleic acid molecule (e.g., a control sgRNA that does not bind a target polynucleotide sequence of interest); or a cell comprising a reduced number of heterologous nucleic acid molecules (e.g., a fewer number of sgRNAs), in cases where a pool of different guide nucleic acid molecules was used to reduce viral infection,

[0185] In some embodiments of any one of the systems disclosed herein, the corresponding control can comprise a cell lacking the first therapeutic agent or the second therapeutic agent. For example, the control can comprise a cell having the first therapeutic agent but lacking the second therapeutic agent. In another example, the control can comprise a cell lacking the first therapeutic agent but having the second therapeutic agent. In a different example, the control can comprise a cell lacking both the first therapeutic agent and the second therapeutic agent.

[0186] In some embodiments of any one of the systems disclosed herein, the combination of the first therapeutic agent and the second therapeutic agent can effect enhanced reduction in the viral infection in the cell by at least about 10%, 15%, 20%, 25%, 30%, 35%, 40%, 45%, 50%, 55%, 60%, 65%, 70%, 75%, 80%, 85%, 90%, 95%, 100%, 150%, 200%, or more as compared to the corresponding control. In some embodiments of any one of the systems disclosed herein, the combination of the first therapeutic agent and the second therapeutic agent can effect enhanced reduction in the viral infection in the cell by at most about 100%, 95%, 90%, 85%, 80%, 75%, 70%, 65%, 60%, 55%, 50%, 45%, 40%, 35%, 30%, 25%, 20%, 15%, 10%, or less as compared to the corresponding control.

[0187] In some embodiments of any one of the systems disclosed herein, the combination of the first therapeutic agent and the second therapeutic agent can effect enhanced reduction in the viral infection in the cell by at least about 0.1 fold, at least about 0.2 fold, at least about 0.3 fold, at least about 0.4 fold, at least about 0.5 fold, at least about 0.6 fold, at least about 0.7 fold, at least about 0.8 fold, at least about 0.9 fold, at least about 1 fold, at least about 1.1 fold, at least about 1.2 fold, at least about 1.3 fold, at least about 1.4 fold, at least about 1.5 fold, at least about 1.6 fold, at least about 1.7 fold, at least about 1.8 fold, at least about 1.9 fold, at least about 2 fold, at least about 2.5 fold, at least about 3 fold, at least about 3.5 fold, at least about 4 fold, at least about 4.5 fold, at least about 5 fold, at least about 6 fold, at least about 7 fold, at least about 8 fold, at least about 9 fold, at least about 10 fold, at least about 12 fold, at least about 15 fold, at least about 20-fold, at least about 30-fold, at least about 40-fold, at least about 50-fold, at least about 60-fold, at least about 70-fold, at least about 80-fold, at least about 90-fold, or at least about 100-fold, or more as compared to the corresponding control. In some embodiments of any one of the systems disclosed herein, the combination of the first therapeutic agent and the second therapeutic agent can effect enhanced reduction in the viral infection in the cell by at most about 100-fold, at most about 90-fold, at most about 80-fold, at most about 70-fold, at most about 60-fold, at most about 50-fold, at most about 40-fold, at most about 30-fold, at most about 20-fold, at most about 15-fold, at most about 10-fold, at most about 9-fold, at most about 8-fold, at most about 7-fold, at most about 6-fold, at most about 5-fold, at most about 4.5-fold, at most about 4-fold, at most about 3.5-fold, at most about 3-fold, at most about 2.5-fold, at most about 2-fold, at most about 1.9-fold, at most about 1.8-fold, at most about 1.7-fold, at most about 1.6-fold, at most about 1.5-fold, at most about 1.4-fold, at most about 1.3-fold, at most about 1.2-fold, at most about 1.1-fold, at most about 1-fold, at most about 0.9-fold, at most about 0.8-fold, at most about 0.7-fold, at most about 0.6-fold, at most about 0.5-fold, at most about 0.4-fold, at most about 0.3-fold, at most about 0.2-fold, at most about 0.1-fold, or less as compared to the corresponding control.

[0188] In some embodiments of any one of the systems disclosed herein, the first therapeutic agent (or a gene encoding thereof) and the second therapeutic agent (or a gene encoding thereof) can be parts of a same composition (e.g., the same therapeutic composition). The same composition can be used (e.g., administered to a cell or a subject in need thereof) for reducing viral injection. In some embodiments of any one of the systems disclosed herein, the first therapeutic agent (or a gene encoding thereof) and the second therapeutic agent can be in different compositions (e.g., different therapeutic compositions). The different compositions can be used (e.g., administered to a subject in need thereof at two different time points and/or two different administration modes/sites) for reducing viral injection. In some examples, a first composition comprising the first therapeutic agent can be used (e.g., administered to a cell or a subject in need thereof) prior to use of a second composition comprising the second therapeutic agent. In some examples, the second composition comprising the second therapeutic agent can be used (e.g., administered to a cell or a subject in need thereof) prior to use of the first composition comprising the first therapeutic agent. In some examples, the first composition comprising the first therapeutic agent and the second composition comprising the second therapeutic agent can be used (e.g., administered to a cell or a subject in need thereof) substantially simultaneously to each other.

[0189] In some embodiments of any one of the systems disclosed herein, the combination effect of the first therapeutic agent and the second therapeutic agent in reducing viral infection can be a synergistic effect or an additive effect. The additive effect can be a sum of a plurality of therapeutic effects of a plurality of therapeutic agents, when the therapeutic effect of each therapeutic agent is measured or tested individually. In contrast, the synergistic effect can be a therapeutic effect of the sum of the plurality of therapeutic agents, which therapeutic effect is higher in terms of degree or longer in terms of duration than the additive effect. For example, when administering the first therapeutic agent and the second therapeutic agent to subjects in need thereof, the synergistic effect of administering both administering the first therapeutic agent and the second therapeutic agent to a subject can be higher in terms of degree or longer in terms of duration than the sum of the therapeutic effects of the first therapeutic agent and the second therapeutic agent when they are administered and tested individually (i.e., additive effect).

[0190] In some embodiments of any one of the systems disclosed herein, a fold decrease in viral infection (e.g., viral replication) from the synergistic effect of the first therapeutic agent and the second therapeutic agent can be greater than a fold decrease in viral infection from the additive effect of the first therapeutic agent and the second therapeutic agent by at least about 0.1 fold, at least about 0.2 fold, at least about 0.3 fold, at least about 0.4 fold, at least about 0.5 fold, at least about 0.6 fold, at least about 0.7 fold, at least about 0.8 fold, at least about 0.9 fold, at least about 1 fold, at least about 1.1 fold, at least about 1.2 fold, at least about 1.3 fold, at least about 1.4 fold, at least about 1.5 fold, at least about 1.6 fold, at least about 1.7 fold, at least about 1.8 fold, at least about 1.9 fold, at least about 2 fold, at least about 2.5 fold, at least about 3 fold, at least about 3.5 fold, at least about 4 fold, at least about 4.5 fold, at least about 5 fold, at least about 6 fold, at least about 7 fold, at least about 8 fold, at least about 9 fold, at least about 10 fold, at least about 12 fold, at least about 15 fold, at least about 20-fold, at least about 30-fold, at least about 40-fold, at least about 50-fold, at least about 60-fold, at least about 70-fold, at least about 80-fold, at least about 90-fold, or at least about 100-fold, or more. In some embodiments of any one of the systems disclosed herein, the fold decrease in viral infection from the synergistic effect of the first therapeutic agent and the second therapeutic agent can be greater than the fold decrease in viral infection from the additive effect of the first therapeutic agent and the second therapeutic agent by at most about 100-fold, at most about 90-fold, at most about 80-fold, at most about 70-fold, at most about 60-fold, at most about 50-fold, at most about 40-fold, at most about 30-fold, at most about 20-fold, at most about 15-fold, at most about 10-fold, at most about 9-fold, at most about 8-fold, at most about 7-fold, at most about 6-fold, at most about 5-fold, at most about 4.5-fold, at most about 4-fold, at most about 3.5-fold, at most about 3-fold, at most about 2.5-fold, at most about 2-fold, at most about 1.9-fold, at most about 1.8-fold, at most about 1.7-fold, at most about 1.6-fold, at most about 1.5-fold, at most about 1.4-fold, at most about 1.3-fold, at most about 1.2-fold, at most about 1.1-fold, at most about 1-fold, at most about 0.9-fold, at most about 0.8-fold, at most about 0.7-fold, at most about 0.6-fold, at most about 0.5-fold, at most about 0.4-fold, at most about 0.3-fold, at most about 0.2-fold, at most about 0.1-fold, or less.

[0191] In some embodiments of any one of the systems disclosed herein, a duration of reduced viral infection (e.g., viral replication) from the synergistic effect of the first therapeutic agent and the second therapeutic agent can be greater than a duration of reduced viral infection from the additive effect of the first therapeutic agent and the second therapeutic agent by at least about 0.1 fold, at least about 0.2 fold, at least about 0.3 fold, at least about 0.4 fold, at least about 0.5 fold, at least about 0.6 fold, at least about 0.7 fold, at least about 0.8 fold, at least about 0.9 fold, at least about 1 fold, at least about 1.1 fold, at least about 1.2 fold, at least about 1.3 fold, at least about 1.4 fold, at least about 1.5 fold, at least about 1.6 fold, at least about 1.7 fold, at least about 1.8 fold, at least about 1.9 fold, at least about 2 fold, at least about 2.5 fold, at least about 3 fold, at least about 3.5 fold, at least about 4 fold, at least about 4.5 fold, at least about 5 fold, at least about 6 fold, at least about 7 fold, at least about 8 fold, at least about 9 fold, at least about 10 fold, at least about 12 fold, at least about 15 fold, at least about 20-fold, at least about 30-fold, at least about 40-fold, at least about 50-fold, at least about 60-fold, at least about 70-fold, at least about 80-fold, at least about 90-fold, or at least about 100-fold, or more. In some embodiments of any one of the systems disclosed herein, the duration of reduced viral infection from the synergistic effect of the first therapeutic agent and the second therapeutic agent can be greater than the duration of reduced viral infection from the additive effect of the first therapeutic agent and the second therapeutic agent by at most about 100-fold, at most about 90-fold, at most about 80-fold, at most about 70-fold, at most about 60-fold, at most about 50-fold, at most about 40-fold, at most about 30-fold, at most about 20-fold, at most about 15-fold, at most about 10-fold, at most about 9-fold, at most about 8-fold, at most about 7-fold, at most about 6-fold, at most about 5-fold, at most about 4.5-fold, at most about 4-fold, at most about 3.5-fold, at most about 3-fold, at most about 2.5-fold, at most about 2-fold, at most about 1.9-fold, at most about 1.8-fold, at most about 1.7-fold, at most about 1.6-fold, at most about 1.5-fold, at most about 1.4-fold, at most about 1.3-fold, at most about 1.2-fold, at most about 1.1-fold, at most about 1-fold, at most about 0.9-fold, at most about 0.8-fold, at most about 0.7-fold, at most about 0.6-fold, at most about 0.5-fold, at most about 0.4-fold, at most about 0.3-fold, at most about 0.2-fold, at most about 0.1-fold, or less.

[0192] In some embodiments of any one of the systems disclosed herein, the second therapeutic agent can be an antiviral agent. The antiviral agent may not be capable targeting (e.g., binding) a viral gene or a derivative thereof. The antiviral agent may induce antiviral effect (e.g., reducing viral infection) by one or more mechanisms other than directly binding to a target viral gene. In some embodiments, the antiviral agent may not comprise a guide nucleic acid (e.g., sgRNA) designed to exhibit complementarity to a target viral gene. Non-limiting examples of the antiviral agent can include a cytokine, a small molecule, a silencing nucleic acid (e.g., siRNA, microRNA, etc.), and an antibody or a derivative thereof.

[0193] In some embodiments of any one of the systems disclosed herein, the antiviral agent can be an immune regulator. In some cases, the immune regulator can induce immunostimulatory or immunomodulatory effect in a host subject. In some cases, the immune regulator can activate (e.g., directly activate or indirectly activate) hematopoietic cells, such as, e.g., hematopoietic stem cells or immune cells (e.g., T cells, natural killer (NK) cells, NK T cells, macrophages, B cells, etc.). In some cases, the immune regulator can activate an activity (e.g., anti-viral activity or response) of the hematopoietic cells or prolong the activity/response.

[0194] In some embodiments of any one of the systems disclosed herein, the immune regulator can be a polypeptide (e.g., a cytokine) or a gene encoding thereof (e.g., a DNA plasmid, messenger RNA (mRNA), etc.). In some cases, the immune regulator cytokine can be an interferon (IFN), a derivative thereof, or a functional variant thereof. Non-limiting examples of the interferon can include type I IFN (e.g., IFN-α, IFN-β), type II IFN (e.g., IFN-γ), and type III IFN (e.g., IFN-λ). IFNs can be important for inducing, activating, or prolonging immune response (e.g., innate immune response) to viral infection. In some cases, the immune regulator cytokine can be an interleukin (IL), a derivative thereof, or a functional variant thereof. One or more IL cytokines can induce production (e.g., expression) of one or more IFN cytokines, thereby to induce immunostimulatory or immunomodulatory effect in a host subject. Non-limiting examples of the IL can include L-1, IL-2, IL-3, IL-4, IL-5, IL-6, IL-7, IL-8, IL-10, IL-11, IL-12, IL-13, IL-14, IL-16, IL-17, IL-18, IL-19, IL-20, IL-21, IL-22, IL-23, IL-24, IL, 25, IL-26, IL-27, IL-28, IL-29, IL-30, IL-31, IL-32, IL-33, IL-34, IL-35, IL-36, IL-37, and IL-38.

[0195] In some embodiments of any one of the systems disclosed herein, the antiviral agent can be an inhibitor moiety (e.g., a small molecule) that reduces activity of (i) a protein of a host cell (e.g., a protease) or (ii) a viral protein (e.g., RdRP, non-structural proteins, etc.). In some cases, the inhibitor moiety can be an enzyme inhibitor, such as, for example, a serine protease (e.g., Transmembrane protease, serine 2 (TMPRSS2)) inhibitor (e.g., camostat salt (e.g., camostat mesylate), a metabolite of camostat, nafamostat, sepimostat, gabexate, etc.); a cysteine protease (e.g., cathepsin B, calpains 1 and 2) inhibitor (e.g., Balicatib, CA074, Calpeptin, E-64, E-64d, L006235, SID26681509, etc.); a dehydrogenase (e.g., inosine-5′-monophosphate dehydrogenase (IMPDH)) inhibitor (e.g., ribavirine); or a kinease (e.g., a tyrosine kinase, such as JAK) inhibitor (e.g., Baricitinib). In some cases, the inhibitor moiety can be an inhibitor of a viral protein. In some examples, the viral protein RdRP can be targeted and its activity reduced by the inhibitor moiety, such as, e.g., EIDD-1931, Remdesivir, favipiravir, etc. In some examples, a nonstructural viral protein (e.g., nonstructural protein 5A (NS5A)) can be targeted and its activity reduced by the inhibitor moiety, such as, e.g., Elbasvir, Velpatasvir, etc.

[0196] Additional non-limiting examples of the antiviral agent can include, but are not limited to, 5-substituted 2′-deoxyuridine analogues, nucleoside analogues, pyrophosphate analogues, nucleoside reverse transcriptase inhibitors, non-nucleoside reverse transcriptase inhibitors, integrase inhibitors, entry inhibitors, acyclic guanosine analogues, acyclic nucleoside phosphonate analogues, oligonucleotides, and antimitotic inhibitors.

[0197] In some embodiments of any one of the systems disclosed herein, the second therapeutic agent (e.g., the antiviral agent) can be capable targeting (e.g., binding) an endogenous gene of a host cell, to thereby reduce viral infection in the host cell. The endogenous gene can encode an endogenous protein involved in viral infection in the host cell. For example, the endogenous protein may be a protein involved in (e.g., required for) attachment of a virus to the cell, penetration of the virus into the cell, uncoating of capsid of the virus, replication of the virus in the cell, or lysis of the cell to release replicated virus particles. In some cases, the endogenous gene can encode a transmembrane protein, such as a transmembrane protease. Non-limiting examples of the transmembrane protein can include TMPRSS2, angiotensin-converting enzyme 2 (ACE2) receptor, and Angiotensin 11 receptor type 1 (AT1R). In some cases, the endogenous gene can encode a peptidase, e.g., an aminopeptidase. Non-limiting examples of the peptidase can include alanyl aminopeptidase (ANPEP) and carboxypeptidase. In some cases, the endogenous gene can encode a protein exhibiting a plurality of distinct enzymatic activities (e.g., 2 or 3 different enzymatic activities). Non-limiting examples of the distinct enzymatic activities can include dehydrogenase activity (e.g., methylenetetrahydrofolate dehydrogenase activity), cyclohydrolase activity (e.g., methenyltetrahydrofolate cyclohydrolase activity), and ligase activity (e.g., formate-tetrahydrofolate ligase). For example, the endogenous gene can be methylenetetrahydrofolate dehydrogenase 1 (MTHFD1). In some cases, the endogenous gene can encode an intracellular protein of the cell, such as MTHFD1.

[0198] In some embodiments of any one of the systems disclosed herein, the second therapeutic agent (e.g., the antiviral agent) can comprise (i) an additional heterologous polypeptide comprising an additional gene regulating moiety or (ii) an additional heterologous nucleic acid molecule, wherein the additional gene regulating moiety or the additional heterologous nucleic acid molecule can be configured to bind the endogenous gene (e.g., promoter sequence, exon, intron, etc.). In some cases, the second therapeutic agent can only comprise the additional heterologous polypeptide comprising the additional gene regulating moiety (e.g., TALEN, ZFN, etc.). In some cases, the second therapeutic agent can only comprise the additional heterologous nucleic acid molecule (e.g., siRNA, miRNA, etc.). In some cases, the second therapeutic agent can comprise both the additional heterologous polypeptide comprising the additional gene regulating moiety and the additional heterologous nucleic acid molecule, to form a complex (e.g., a CRISPR/Cas-sgRNA complex) that is designed to specifically bind the endogenous gene of the host cell, as disclosed herein.

[0199] In some embodiments of any one of the systems disclosed herein, the system can be for regulating (e.g., reducing, maintaining, or enhancing) expression of one or more target viral genes in a cell. In some embodiments, the system can be for reducing the expression of the one or more target viral genes in the cell. The target viral gene can encode a viral polypeptide or a fragment thereof. Examples of the viral polypeptide can include, but are not limited to, RNA-dependent RNA polymerase (RdRP), hemagglutinin (HA), nucleoprotein (N-protein), neuraminidase (NA), matrix protein (e.g., M1 or M2 proteins), NS1 protein, and nuclear export proteins, PB2, PB2, PB1-F2, PA, NP, M1, M2, NS1, and NEP/NS2. In some cases, the viral polypeptide can comprise RdRP or a fragment thereof or N-protein or a fragment thereof. In some cases, the viral polypeptide comprise hemagglutinin (HA), neuraminidase (NA), a fragment thereof, or a combination thereof.

[0200] In some embodiments, the system as disclosed herein can comprise a heterologous polypeptide comprising a gene regulating moiety. The gene regulating moiety can be configured to regulate expression of the one and/or more target viral genes in the cell.

[0201] In some embodiments, the system as disclosed herein can comprise at least one heterologous RNA polynucleotide configured to bind at least a portion of the one or more target viral genes in the cell. In some cases, the at least one heterologous RNA polynucleotide can be capable of (or configured to) forming a complex with a heterologous polypeptide comprising a gene regulating moiety to regulate expression of the one or more target viral genes in the cell.

[0202] In some embodiments, the gene regulating moiety can be an RNA-guided gene regulating moiety that binds at least a portion of the one or more target viral genes. In some cases, the system further comprises at least one heterologous RNA polynucleotide configured to bind to the at least a portion or a fragment of the target one or more viral genes. In some instances, the system comprises a plurality of heterologous RNA polynucleotides configured to bind to the at least a portion or a fragment of the target one or more viral genes. The plurality of heterologous RNA polynucleotides can comprise at least 1, 2, 3, 4, 5, 6, 7, 8, 9, 10, 11, 12, 13, 14, 15, 20, 21, 22, 23, 24, 25, 30, 40, 50, or more heterologous RNA polynucleotides. The plurality of heterologous RNA polynucleotides can comprise at most 50, 40, 30, 25, 24, 23, 22, 21, 20, 19, 18, 17, 16, 15, 14, 13, 12, 11, 10, 9, 8, 7, 6, 5, 4, 3, or 2 heterologous RNA polynucleotides.

[0203] In some embodiments, the systems described herein can target a genome of a virus. The virus can be a DNA virus or a RNA virus. The virus may be, for example, a double stranded DNA virus, a single stranded DNA virus, a double stranded RNA virus, a positive sense single stranded RNA virus, a negative sense single stranded RNA virus, a single stranded RNA-reverse transcribing virus (retrovirus) or a double stranded DNA reverse transcribing virus. Examples of DNA viruses cam include, but are not limited to, cytomegalo virus, Herpex Simplex, Epstein-Barr virus, Simian virus 40, Bovine papillomavirus, Adeno-associated virus, Adenovirus, Vaccinia virus, and Baculo virus. Examples of RNA viruses can include, but are not limited to. Coronavirus. Semliki Forest virus, Sindbis virus, Poko virus, Rabies virus, Influenza virus, SV5, Respiratory Syncytial virus. Venezuela equine encephalitis virus, Kunjin virus, Sendai virus, Vesicular stomatitisvirus, and Retroviruses.

[0204] Various specific viruses include, but are not limited to, Papovaviridae, Adenoviridae, Herpesviridae, Herpesvirales, Ascoviridae, Ampullaviridae, Asfarviridae, Baculoviridae, Fuselloviridae, Globuloviridae, Guttaviridae, Hytrosaviridae, Iridoviridae, Lipothrixviridae, Nimaviridae, Poxviridae, Tectiviridae, Corticoviridae, Sulfolobus, Caudovirales, Corticoviridae, Tectiviridaea, Ligamenvirales, Ampullaviridae, Bicaudaviridae, Clavaviridae, Fuselloviridae, Globuloviridae, Guttaviridae, Turriviridae, Ascovirus, Baculovirus, Hytrosaviridae, Iridoviridae, Polydnaviruses, Mimiviridae, Marseillevirus, Megavirus, Mavirus virophage, Sputnik virophage, Nimaviridae, Phycodnaviridae, pleolipoviruses, Plasmaviridae, Pandoraviridae, Dinodnavirus, Rhizidiovirus, Salterprovirus, Sphaerolipoviridae, Anelloviridae, Bidnaviridae, Circoviridae, Geminiviridae, Genomoviridae, Inoviridae, Microviridae, Nanoviridae, Parvoviridae, Spiraviridae, Amalgaviridae, Bimaviridae, Chrysoviridae, Cystoviridae, Endornaviridae, Hypoviridae, Megabimaviridae, Partitiviridae, Picobimaviridae, Quadriviridae, Reoviridae, Totiviridae, Nidovirales, Picomavirales, Tymovirales, Mononegavirales, Bomaviridae, Filoviridae, Mymonaviridae, Nyamiviridae, Paramyxoviridae, Pneumoviridae, Rhabdoviridae, Sunviridae, Anphevirus, Arlivirus, Chengtivirus, Crustavirus, Wastrivirus, Bunyavirales, Feraviridae, Fimoviridae, Hantaviridae, Jonviridae, Nairoviridae, Peribunyaviridae, Phasmaviridae, Phenuiviridae, Tospoviridae, Arenaviridae, Ophioviridae, Orthomyxoviridae, Deltavirus, Taastrup virus, Alpharetrovirus, Avian leukosis virus. Rous sarcoma virus, Betaretrovirus, Mouse mammary tumor virus, Gammaretrovirus, Murine leukemia virus, Feline leukemia virus, Bovine leukemia virus, Human T-lymphotropic virus, Epsilonretrovirus, Walleye dermal sarcoma virus, Lentivirus, Human immunodeficiency virus 1, Simian and Feline immunodeficiency viruses, Spumavirus. Simian foamy virus, Orthoretrovirinae, Spumaretrovirinae, Metaviridae, Pseudoviridae, Retroviridae, Hepadnaviridae, or Caulimoviridae.

[0205] In some embodiments, the systems described herein can target a viral genome comprising a coronavirus genome. In some embodiments, the at least one heterologous RNA polynucleotide can comprise one or more mismatches when optimally aligned with a selected viral genome (e.g., MERS or SARS viral genome). The at least one heterologous RNA polynucleotide can comprise at least 1, 2, 3, 4, 5, 6, 7, 8, 9, 10, or more mismatches when optimally aligned with the selected viral genome. The at least one heterologous RNA polynucleotide can comprise at most 10, 9, 8, 7, 6, 5, 4, 3, 2, or 1 mismatch when optimally aligned with the selected viral genome. In some cases, the at least one heterologous RNA polynucleotide comprises at most 2 mismatches when optimally aligned with MERS and/or SARS viral genome. In alternative embodiments, the at least one heterologous RNA polynucleotide may not or need not comprise any mismatch when optimally aligned with the selected viral genome. In some cases, a single mismatch of the at least one heterologous RNA polynucleotide with respective to a portion of the MERS and/or SARS viral genome can be a nucleotide (e.g., a single nucleotide or an oligonucleotide) insertion or deletion.

[0206] In some embodiments, the gene regulating moiety modulate the expression of the viral gene via the binding of the at least one heterologous RNA polynucleotide to the one or more target viral genes. In some instances, the gene regulating moiety can reduce the expression level of the one or more target viral genes when the one or more viral genes is targeted and bound by the at least one heterologous RNA polynucleotide. In some embodiments, the RNA polynucleotide-guided gene regulating moiety can be a RNA-guided nuclease. In some embodiments, the RNA polynucleotide-guided gene regulating moiety can be a RNA-guided nuclease exhibiting RNA cleaving activity. In some embodiments, the RNA polynucleotide-guided gene regulating moiety can be a CRISPR/Cas protein. In some embodiments, the system, gene regulating moiety, and/or heterologous RNA polynucleotide can be collectively or separately packaged and delivered into a cell.

[0207] In some embodiments, the at least one heterologous RNA polynucleotide as described in the present disclosure can comprise at least about 50%, 55%, 60%, 65%, 70%, 75%, 80%, 81%, 82%, 83%, 84%, 85%, 86%, 87%, 88%, 89%, 90%, 91%, 92%, 93%, 94%, 95%, 9%, 97%, 98%, 99%, or more sequence identity to a sequence selected from SEQ ID NOs: 1-3203, 8001-11203, 12001-12040, 12201-12240, 13001-13022, and 13201-13222.

[0208] The at least one heterologous RNA polynucleotide as described in the present disclosure can comprise at most about 100%, 99%, 98%, 97%, 96%, 95%, 94%, 93%, 92%, 91%, 90%, 89%, 88%, 87%, 86%, 85%, 84%, 83%, 82%, 81%, 80%, 75%, 70%, 65%, 60%, 55%, 50%, or less sequence identity to a sequence selected from SEQ ID NOs: 1-3203, 8001-11203, 12001-12040, 12201-12240, 13001-13022, and 13201-13222.

[0209] In some embodiments, the at least one heterologous RNA polynucleotide as described in the present disclosure can comprise at least about 50%, 55%, 60%, 65%, 70%, 75%, 80%, 81%, 82%, 83%, 84%, 85%, 86%, 87%, 88%, 89%, 90%, 91%, 92%, 93%, 94%, 95%, 96%, 97%, 98%, 99%, or more sequence identity to a sequence selected from SEQ ID NOs: 4001-7203, 12101-12140, and 13101-13122.

[0210] The at least one heterologous RNA polynucleotide as described in the present disclosure can comprise at most about 100%, 99%, 98%, 97%, 96%, 95%, 94%, 93%, 92%, 91%, 90%, 89%, 88%, 87%, 86%, 85%, 84%, 83%, 82%, 81%, 80%, 75%, 70%, 65%, 60%, 55%, 50%, or less sequence identity to a sequence selected from SEQ ID NOs: 4001-7203, 12101-12140, and 13101-13122.

[0211] In some preferred embodiments, the at least one heterologous RNA polynucleotide described in the present disclosure can comprise at least about 50%, 55%, 60%, 65%, 70%, 75%, 80%, 81%, 82%, 83%, 84%, 85%, 86%, 87%, 88%, 89%, 90%, 91%, 92%, 93%, 94%, 95%, 96%, 97%, 98%, 99%, or more sequence identity to a sequence selected from SEQ ID NOs: 13101, 13102, 13103, 13104, 13105, and 13106.

[0212] In some preferred embodiments, the at least one heterologous RNA polynucleotide as described in the present disclosure can comprise at most about 100%, 99%, 98%, 97%, 96%, 95%, 94%, 93%, 92%, 91% 90%, 89%, 88%, 87%, 86%, 85%, 84%, 83%, 82%, 81%, 80%, 75%, 70%, 65%, 60%, 55%, 50%, or less sequence identity to a sequence selected from SEQ ID NOs: 13101, 13102, 13103, 13104, 13105, and 13106.

[0213] In some cases, the at least one heterologous RNA polynucleotide can be configured to effect at least about 30%, 35%, 40%, 45%, 50%, 55%, 60%, 65%, 70%, 75%, 80%, 81%, 82%, 83%, 84%, 85%, 86%, 87%, 88%, 89%, 90%, 91%, 92%, 93%, 94%, 95%, 96%, 97%, 98%, 99%, or more reduction in expression of one or more target viral genes encoding one or more viral proteins (e.g., RdRP and/or N-protein) or a fragment thereof. In some cases, the least one heterologous RNA polynucleotide can be configured to effect at most about 100%, 99%, 98%, 97%, 96%, 95%, 94%, 93%, 92%, 91%, 90%, 89%, 88%, 87%, 86%, 85%, 84%, 83%, 82%, 81%, 80%, 75%, 70%, 65%, 60%, 55%, 50%, 45%, 40%, 35%, 30%, or less in expression of one or more target viral genes encoding one or more viral proteins (e.g., RdRP and/or N-protein) or a fragment thereof.

[0214] In some embodiments, the systems described herein can target a genome of an influenza virus.

[0215] In some embodiments, the systems described herein can target a viral genome comprising an influenza viral genome. In some embodiments, the at least one heterologous RNA polynucleotide can comprise one or more mismatches when optimally aligned with a selected viral genome (e.g., influenza genome). The at least one heterologous RNA polynucleotide can comprise at least 1, 2, 3, 4, 5, 6, 7, 8, 9, 10, or more mismatches when optimally aligned with the selected viral genome. The at least one heterologous RNA polynucleotide can comprise at most 10, 9, 8, 7, 6, 5, 4, 3, 2, or 1 mismatch when optimally aligned with the selected viral genome. In some cases, the at least one heterologous RNA polynucleotide comprises at most 2 mismatches when optimally aligned with influenza viral genome. In alternative embodiments, the at least one heterologous RNA polynucleotide may not or need not comprise any mismatch when optimally aligned with the selected viral genome. In some cases, a single mismatch of the at least one heterologous RNA polynucleotide with respective to a portion of the influenza viral genome can be a nucleotide (e.g., a single nucleotide or an oligonucleotide) insertion or deletion.

[0216] In some embodiments, the gene regulating moiety modulate the expression of the viral gene via the binding of the at least one heterologous RNA polynucleotide to the one or more target viral genes. In some instances, the gene regulating moiety can reduce the expression level of the one or more target viral genes when the one or more viral genes is targeted and bound by the at least one heterologous RNA polynucleotide. In some embodiments, the RNA polynucleotide-guided gene regulating moiety can be a RNA-guided nuclease. In some embodiments, the RNA polynucleotide-guided gene regulating moiety can be a RNA-guided nuclease exhibiting RNA cleaving activity. In some embodiments, the RNA polynucleotide-guided gene regulating moiety can be a CRISPR/Cas protein. In some embodiments, the system, gene regulating moiety, and/or heterologous RNA polynucleotide can be collectively or separately packaged and delivered into a cell.

[0217] In some embodiments, the at least one heterologous RNA polynucleotides as described in the present disclosure can comprise any sequence in SEQ ID NOs: 1-3203, 4001-7203, and 8001-11203.

[0218] In some embodiments, the at least one heterologous RNA polynucleotide as described in the present disclosure can comprise at least about 50%, 55%, 60%, 65%, 70%, 75%, 80%, 81%, 82%, 83%, 84%, 85%, 86%, 87%, 88%, 89%, 90%, 91%, 92%, 93%, 94%, 95%, 96%, 97%, 98%, 99%, or more sequence identity to a sequence selected from SEQ ID NOs: 13301-13348, 13401-13448, and 13501-13548.

[0219] The at least one heterologous RNA polynucleotide as described in the present disclosure can comprise at most about 100%, 99%, 98%, 97%, 96%, 95%, 94%, 93%, 92%, 91%, 90%, 89%, 88%, 87%, 86%, 85%, 84%, 83%, 82%, 81%, 80%, 75%, 70%, 65%, 60%, 55%, 50%, or less sequence identity to a sequence selected from SEQ ID NOs: 13301-13348, 13401-13448, and 13501-13548.

[0220] In some cases, the at least one heterologous RNA polynucleotide can be configured to effect at least about 30%, 35%, 40%, 45%, 50%, 55%, 60%, 65%, 70%, 75%, 80%, 81%, 82%, 83%, 84%, 85%, 86%, 87%, 88%, 89%, 90%, 91%, 92%, 93%, 94%, 95%, 96%, 97%, 98%, 99%, or more reduction in expression of one or more target viral genes encoding one or more viral proteins (e.g., PB2, PB2, PB1-F2, PA, HA, NP, NA, M1, M2, NS1, and/or NEP/NS2) or a fragment thereof. In some cases, the least one heterologous RNA polynucleotide can be configured to effect at most about 100%, 99%, 98%, 97%, 96%, 95%, 94%, 93%, 92%, 91%, 90%, 89%, 88%, 87%, 86%, 85%, 84%, 83%, 82%, 81%, 80%, 75%, 70%, 65%, 60%, 55%, 50%, 45%, 40%, 35%, 30%, or less in expression of one or more target viral genes encoding one or more viral proteins (e.g., PB2, PB2, PB1-F2, PA, HA, NP, NA, M1, M2, NS1, and/or NEP/NS2) or a fragment thereof.

[0221] In some embodiments, the at least one heterologous RNA polynucleotide as described in the present disclosure can comprise at least about 50%, 55%, 60%, 65%, 70%, 75%, 80%, 81%, 82%, 83%, 84%, 85%, 86%, 87%, 88%, 89%, 90%, 91%, 92%, 93%, 94%, 95%, 96%, 97%, 98%, 99%, or more sequence identity to a sequence selected from SEQ ID NOs: 13601-13606, 13607-13649, 13651-13664, 13671-13684, and 13701-13729.

[0222] The at least one heterologous RNA polynucleotide as described in the present disclosure can comprise at most about 100%, 99%, 98%, 97%, 96%, 95%, 94%, 93%, 92%, 91%, 90%, 89%, 88%, 87%, 86%, 85%, 84%, 83%, 82%, 81%, 80%, 75%, 70%, 65%, 60%, 55%, 50%, or less sequence identity to a sequence selected from SEQ ID NOs: 13601-13606, 13607-13649, 13651-13664, 13671-13684, and 13701-13729.

[0223] In some embodiments, the at least one heterologous RNA polynucleotide comprising a nucleic acid sequence of any one SEQ ID NOs: 13601-13606 targets an endogenous gene of the cell being infected by any one of strain of the virus described herein. In some embodiments, the endogenous gene is a member of the peptidase family M1 such as aminopeptidase N (ANPEP), aminopeptidase A, leukotriene A4 hydrolase, Ape2 aminopeptidase, Aap1′ aminopeptidase, pyroglutamyl-peptidase II, cytosol alanyl aminopeptidase, cystinyl aminopeptidase, aminopeptidase G, aminopeptidase B, aminopeptidase Ey, endoplasmic reticulum aminopeptidase 1, tricom interacting factor F2, tricorn interacting factor F3, arginyl aminopeptidase-like 1, ERAP2 aninopeptidase, aminopeptidase, aminopeptidase O, or Tata binding protein associated factor. In some embodiments, the endogenous gene targeted by the heterologous RNA polynucleotide is ANPEP. In some embodiments, the endogenous gene is a member of the minor histocompatibility antigen family such as AKAP13, APOBEC3B, ARHGDIB, BCAT2, BCL2A1, CD19, CENPM, CTSH, C19orf48, DDX3Y, DPH1, EB13, ERAP1, ERBB2, GEMIN4, HEATR1, ARHGAP45, HMHB1, HMSD, KDM5D, PUM3, RESF1, LY75, MR1, MTHFD1, MYO1G, NUP133, PDCD11, P14K2B, PKN3, PRCP, PTK2B, P2RX5, RPS4Y1, SLC1A5, SLC19A1, SON, SP110, SSR1, SWAP70, TMSB4Y, TOR3A, TRIM22, TRIM42, TRIP10, TYMP, UGT2B17, USP9Y, UTY, WNK1, or ZNF419. In some embodiments, the endogenous gene targeted by the heterologous RNA polynucleotide is MTHFD1. In some embodiments, the endogenous gene is a member of the type II transmembrane serine protease family such as HAT/DESC subfamily: HAT, DESC1, TMPRSS11A, HAT-like 2, HAT-like 3, HAT-like 4, HAT-like 5; Hepsin/TMPRSS subfamily: Hepsin, TMPRSS2, TMPRSS3, TMPRSS4, MSPL, Spinesin, Enteropeptidase; Matriptase subfamily: Matriptase, Matriptase-2, Matripase-3, Polyserease-1; and Corin subfamily Corin. In some embodiments, the endogenous gene targeted by the heterologous RNA polynucleotide is TMPRSS2.

[0224] In some embodiments, the at least one heterologous RNA polynucleotide comprising a nucleic acid sequence of any one of SEQ ID NOs: 13607-13649 or 13701-13729 can target the RdRP, N-protein, or the viral genome of any one strain of the coronavirus described herein. In some embodiments, a combination of the at least one heterologous RNA polynucleotide comprising a nucleic acid sequence of any one of SEQ ID NOs: 13651-13664 or 13671-13684 can target any one strain of the virus described herein. In some embodiments, a combination of the at least one heterologous RNA polynucleotide comprising a nucleic acid sequence of any one of SEQ ID NOs: 13651-13664 or 13671-13684 can target viral genome of at least about 500, 1000, 5000, 10000, 15000, 20000, 21000, 22000, 23000, 24000, 25000, 30000, or more strains of virus. of any one of the strain of the virus described herein. In some embodiments, a combination of the at least one heterologous RNA polynucleotide comprising a nucleic acid sequence of any one of SEQ ID NOs: 13651-13664 or 13671-13684 can target viral genome of at least about 500, 1000, 5000, 10000, 15000, 20000, 21000, 22000, 23000, 24000, 25000, 30000, or more strains of virus. of any one of the strain of the RNA virus described herein. Non-limiting examples of the RNA virus include RNA virus families of Coronaviridae, Pneumoviridae, Paramyxoviridae, Caliciviridae, Hepeviridae, Picomaviridae, Filoviridae, Flaviviridae, Rhabdoviridae, or Togaviridae.

[0225] In some embodiments, the cell can be contacted with the system in vivo, ex vivo, or in vitro. In some embodiments, the cell can be contacted with the system in vivo. In some embodiments, the cell can be contacted with the system ex vivo. In some embodiments, the cell can be contacted with the system in vitro. In some cases, the cell can be contacted by the system in vivo via administration of the system to a subject comprising the cell. Alternatively, both the cell and the system can be administered to the subject (e.g., via the same route of administration or different routes of administration), and the contacting between the cell and the system can occur in vivo, e.g., in the blood or a different tissue. In other cases, the cell can be contacted by the system ex vivo or in vitro. For example, the cell can be contacted by the system in a reaction mixture. Upon such contacting, the cell in the reaction mixture can be analyzed to measure the extent of viral transfection in the cell. Alternatively, upon the contacting, the cell (e.g., with or without the system) can be administered to a subject for a cell therapy, thereby reducing a chance of viral transfection in the cell and the subject prior to the cell therapy. Examples of the cell therapy can include stem cell therapies (e.g., for tissue repair or regeneration, neurodegenerative diseases, etc.) and immune cell therapies (e.g., chimeric antigen receptor (CAR) T cell therapies), as disclosed herein.

[0226] In some embodiments, the method can comprise contacting the cell with a polynucleotide encoding the systems (e.g., the heterologous polypeptide and/or the at least one heterologous polynucleotide) described herein, where the contacted cell can express the systems encoded by the polynucleotide. In some embodiments, the method can comprise directly delivering the systems described herein to the contacted cell. In some embodiments, a polynucleotide encoding the gene regulating moiety can be introduced into the cell, where the cell subsequently expresses the gene regulating moiety. In some embodiments, the systems can reduce expression of the one or more target viral genes. In some cases, the method comprises administering the systems described herein to a subject in need thereof.

[0227] Another aspect of the present disclosure provides a composition comprising any one of the systems described herein. Another aspect of the present disclosure provides a kit comprising such composition. Another aspect of the present disclosure provides a reaction mixture comprising (i) any one of the systems described herein and (ii) a biological sample (e.g., urine, blood, cell, tissue, organ, organism, etc.).

[0228] Another aspect of the present disclosure provides a method for reducing expression of one or more target viral genes in a cell by contacting the cell with any of the systems (e.g., systems comprising the heterologous polypeptide and/or the at least one heterologous polynucleotide) described herein.

### III. Additional Aspects

[0229] A. Virus

[0230] Described herein, in some embodiments, are systems and methods for targeting viral genomes or viral genes. In some embodiments, the systems and methods described herein target the transcripts of the viral genomes or viral genes. In some cases, the systems and methods described herein target the viral genomes or viral genes for cleavage or degradation. In some cases, the systems and methods described herein target the transcripts of the viral genomes or viral genes for cleavage or degradation. In some embodiments, the systems and methods described herein cleave or degrade the target viral genomes viral genes. In some embodiments, the systems and methods described herein cleave or degrade the target viral genomes, viral genes, or viral gene segments, or fragments thereof. In some embodiments, the systems and methods decried herein cleave or degrade the transcripts of the target viral genomes, viral genes, or viral gene segments, or fragments thereof.

[0231] In some embodiments, the viral genomes or viral genes being targeted, cleaved, degraded, and/or edited (e.g., mutated) by the systems and methods described herein can be viral genomes or viral genes of coronavirus. In some cases, such targeting, cleaving, degrading, and/or editing can effect reduction of viral infection in the cell or a host comprising the cell. In some instances, the coronavirus can be selected from the group consisting of: alphacoronavirus, betacoronavirus, deltacoronavirus, and gammacoronavirus. Examples of alphacoronavirus can include, but are not limited to, Bat coronavirus CDPHE15, Bat coronavirus HKU10, Human coronavirus 229E, Human coronavirus NL63, Miniopterus bat coronavirus 1, Miniopterus bat coronavirus HKU8, Mink coronavirus 1, Porcine epidemic diarrhea virus, Rhinolophus bat coronavirus HKU2, and Scotophilus bat coronavirus 512. Examples of betacoronavirus can include, but are not limited to, Betacoronavirus 1, Hedgehog coronavirus 1. Human coronavirus HKU1, Middle East respiratory syndrome-related coronavirus, Murine coronavirus, Pipistrellus bat coronavirus HKU5, Rousettus bat coronavirus HKU9, Severe acute respiratory syndrome-related coronavirus, Tylonycteris bat coronavirus HKU4. Examples of deltacoronavirus can include, but are not limited to, Bulbul coronavirus HKU11, Common moorhen coronavirus HKU21, Coronavirus HKU15, Munia coronavirus HKU13, Night heron coronavirus HKU19, Thrush coronavirus HKU12, White-eye coronavirus HKU16, Wigeon coronavirus HKU20. Examples of gammacoronavirus can include, but are not limited to, Avian coronavirus, Beluga whale coronavirus SW1. Additional examples of coronavirus can include MERS-CoV, SARS-CoV, and SARS-Cov-2 (i.e., SARS-COV-2).

[0232] In some embodiments, the viral genomes or viral genes being targeted by the systems and the methods described herein can be selected from any one of the reference viral genome described herein. In some embodiments, the crRNA complements and binds to a reference viral genome, e.g., a viral genome or a fragment thereof from the GenBank. Non-limiting examples of viral genomes from the GenBank can include GenBank Access ID: LC522972, LC522973, LC522974, LC522975, LR757995, LR7579%, LR757997, LR757998, MN908947, MN938384, MN975262, MN985325, MN988668, MN988669, MN988713, MN994467, MN994468, MN996527, MN996528, MN996529, MN996530, MN996531, MN997409, MT007544, MT019529, MT019530, MT019531, MT019532, MT019533, MT020781, MT020880, MT020881, MT027062, MT027063, MT027064, MT039873, MT039887, MT039888, MT039890, MT044257, MT044258, MT049951, MT066175, MT066176, MT072688, MT093571, MT093631, AB257344, AB354579, AB551247, AC_000192, AF029248, AF201929, AF207902, AF208066, AF208067, AF220295, AF304460, AF353511, AF391541, AF391542, AJ271965, AJ311317, AP006557, AP006558, AP006559, AP006560, AP006561, AX154950, AY274119, AY278487, AY278488, AY278489, AY278490, AY278491, AY278554, AY278741, AY279354, AY282752, AY283794, AY283795, AY283796, AY283797, AY283798, AY291315, AY291451, AY297028, AY304486, AY304488, AY304495, AY310120, AY313906, AY319651, AY321118, AY323977, AY338174, AY338175, AY338732, AY345986, AY345987, AY345988, AY348314, AY350750, AY351680, AY357075, AY357076, AY362698, AY362699, AY390556, AY391777, AY394850, AY394978, AY394979, AY394983, AY394985, AY394986, AY394987, AY394989, AY394990, AY394991, AY394992, AY394993, AY394994, AY394995, AY3949%, AY394997, AY394998, AY394999, AY395000, AY395001, AY395002, AY395003, AY427439, AY461660, AY463059, AY463060, AY485277, AY485278, AY502923, AY502924, AY502925, AY502926, AY502927, AY502928, AY502929, AY502930, AY502931, AY502932, AY508724, AY514485, AY515512, AY518894, AY545914, AY545915, AY545916, AY545917, AY545918, AY545919, AY559081, AY559082, AY559083, AY559084, AY559085, AY559086, AY559087, AY559088, AY559089, AY559090, AY559091, AY559092, AY559093, AY559094, AY559095, AY559096, AY559097, AY567487, AY568539, AY572034, AY572035, AY572038, AY585228, AY585229, AY595412, AY597011, AY613947, AY613948, AY613949, AY613950, AY641576, AY646283, AY654624, AY686863, AY686864, AY692454, AY700211, AY714217, AY772062, AY851295, AY864805, AY864806, AY884001, AY903459, AY903460, AY994055, CQ870486, CQ903009, CQ918584, CQ918585, CQ918598, CS037919, CS078029, CS079026, CS079027, CS079028, CS079029, CS116934, CS117114, CS124012, CS254197, CS460762, CS480537, CS569493, DI195813, DJ009246, DJ045279, DJ059765, DJ066921, DL008527, DL476508, DQ001338, DQ001339, DQ010921, DQ011855, DQ022305, DQ071615, DQ084199, DQ084200, DQ182595, DQ201447, DQ286389, DQ288927, DQ339101, DQ412042, DQ412043, DQ415896, DQ415897, DQ415898, DQ415899, DQ415900, DQ415901, DQ415902, DQ415903, DQ415904, DQ415905, DQ415906, DQ415907, DQ415908, DQ415909, DQ415910, DQ415911, DQ415912, DQ415913, DQ415914, DQ443743, DQ445911, DQ445912, DQ497008, DQ640652, DQ646405, DQ648794, DQ648856, DQ648857, DQ648858, DQ811784, DQ811785, DQ811786, DQ811787, DQ811788, DQ811789, DQ834384, DQ848678, DQ898174, DQ915164, EF065505, EF065506, EF065507, EF065508, EF065509, EF065510, EF065511, EF065512, EF065513, EF065514, EF065515, EF065516, EF185992, EF203064, EF203065, EF203066, EF203067, EF424615, EF424616, EF424617, EF424618, EF424619, EF424620, EF424621, EF424622, EF424623, EF424624, EF446615, EU022525, EU022526, EU074218, EU095850, EU111742, EU186072, EU371559, EU371560, EU371561, EU371562, EU371563, EU371564, EU418975, EU418976, EU420137, EU420138, EU420139, EU526388, EU637854, EU714028, EU714029, EU817497, FJ376619, FJ376620, FJ376621, FJ376622, FJ415324, FJ425184, FJ425185, FJ425186, FJ425187, FJ425188, FJ425189, FJ425190, FJ588686, FJ647218, FJ647219, FJ647220, FJ647221, FJ647222, FJ647223, FJ647224, FJ647225, FJ647226, FJ647227, FJ755618, F3807652, FJ882926, FJ882927, FJ882928, FJ882929, FJ882930, FJ882931, FJ882932, F3882933, FJ882934, FJ882935, FJ882936, FJ882937, FJ882938, FJ882939, FJ882940, FJ882941, FJ882942, FJ882943, FJ882944, FJ882945, FJ882946, FJ882947, FJ882948, FJ882949, FJ882950, FJ882951, FJ882952, FJ882953, FJ882954, FJ882955, FJ882956, FJ882957, FJ882958, FJ882959, FJ882960, FJ882961, FJ882962, FJ882963, FJ884686, FJ884687, FJ888351, FJ904713, FJ904714, FJ904715, FJ904716, FJ904717, FJ904718, FJ904719, FJ904720, FJ904721, FJ904722, FJ904723, FJ938051, FJ938052, FJ938053, FJ938054, FJ938055, FJ938056, FJ938057, FJ938058, FJ938059, FJ938060, FJ938061, FJ938062, FJ938063, FJ938064, FJ938065, FJ938066, FJ938067, FJ938068, FJ959407, FN430414, FN430415, FV537210, FV537211, FV537212, FV537213, FW503166, GQ152141, GQ153539, GQ153540, GQ153541, GQ153542, GQ153543, GQ153544, GQ153545, GQ153546, GQ153547, GQ153548, GQ427173, GQ427174, GQ427175, GQ427176, GQ477367, GQ504720, GQ504721, GQ504722, GQ504723, GQ504724, GQ504725, GU190215, GU393331, GU393332, GU393333, GU393334, GU393335, GU393336, GU393337, GU393338, GU553361, GU553362, GU553363, GU553364, GU553365, GU593319, GU937797, H1553383, HM034837, HM211098, HM211099, HM211100, HM211101, HM245923, HM245924, HM245925, HM245926, HM776941, HQ012367, HQ012368, HQ012369, HQ012370, HQ012371, HQ012372, HQ392469, HQ392470, HQ392471, HQ392472, HQ462571, HQ848267, HQ850618, HQ890526, HQ890527, HQ890528, HQ890529, HQ890530, HQ890531, HQ890532, HQ890533, HQ890534, HQ890535, HQ890536, HQ890537, HQ890538, HQ890539, HQ890540, HQ890541, HQ890542, HQ890543, HQ890544, HQ890545, HQ890546, HW269828, HW364297, HW375992, HZ038027, JF274479, JF292902, JF292903, JF292904, JF292905, JF292906, JF292907, JF292908, JF292909, JF292910, JF292911, JF292912, JF292913, JF292914, JF292915, JF292916, JF292917, JF292918, JF292919, JF292920, JF292921, JF292922, JF330898, JF330899, JF705860, JF732903, JF792616, JF792617, JF828980, JF828981, JF893452, JN129834, JN129835, JN183882, JN183883, JN547228, JN634064, JN825712, JN854286, JN856008, JN874559, JN874560, JN874561, JN874562, JQ023161, JQ023162, JQ065042, JQ065043, JQ065044, JQ065045, JQ065046, JQ065047, JQ065048, JQ065049, JQ088078, JQ173883, JQ282909, JQ316196, JQ404409, JQ404410, JQ408980, JQ408981, JQ410000, JQ765563, JQ765564, JQ765565, JQ765566, JQ765567, JQ765568, JQ765569, JQ765570, JQ765571, JQ765572, JQ765573, JQ765574, JQ765575, JQ900255, JQ900256, JQ900257, JQ900258, JQ900259, JQ900260, JQ977697, JQ977698, JQ989266, JQ989267, JQ989268, JQ989269, JQ989270, JQ989271, JQ989272, JQ989273, JX088695, JX104161, JX112709, JX162087, JX163923, JX163924, JX163925, JX163926, JX163927, JX163928, JX169866, JX169867, JX188454, JX195175, JX195176, JX195177, JX195178, JX261936, JX489155, JX503060, JX503061, JX504050, JX524137, JX524171, JX560761, JX647847, JX840411, JX860640, JX869059, JX897900, JX993987, JX993988, KC008600, KC013541, KC109141, KC119407, KC136209, KC140102, KC164505, KC175339, KC175340, KC175341, KC189944, KC196276, KC210145, KC210146, KC210147, KC461235, KC461236, KC461237, KC506155, KC545383, KC545386, KC667074, KC776174, KC869678, KC881005, KC881006, KC962433, KF186564, KF186565, KF186566, KF186567, KF192507, KF267450, KF268336, KF268337, KF268338, KF268339, KF272920, KF294380, KF294457, KF367457, KF377577, KF384500, KF411040, KF411041, KF4301%, KF430199, KF430200, KF430201, KF430202, KF430219, KF452322, KF452323, KF460437, KF468752, KF468753, KF468754, KF514388, KF514389, KF514390, KF514391, KF514392, KF514393, KF514394, KF514395, KF514396, KF514397, KF514398, KF514399, KF514400, KF514401, KF514402, KF514403, KF514404, KF514405, KF514406, KF514407, KF514408, KF514409, KF514410, KF514411, KF514412, KF514413, KF514414, KF514415, KF514416, KF514417, KF514418, KF514419, KF514420, KF514421, KF514422, KF514423, KF514430, KF514432, KF514433, KF530060, KF530061, KF530063, KF530064, KF530065, KF530066, KF530067, KF530068, KF530069, KF530070, KF530071, KF530072, KF530073, KF530074, KF530075, KF530076, KF530077, KF530078, KF530079, KF530080, KF530081, KF530082, KF530083, KF530084, KF530085, KF530086, KF530087, KF530088, KF530089, KF530090, KF530091, KF530092, KF530094, KF530095, KF530096, KF530097, KF530098, KF530099, KF530104, KF530105, KF530106, KF530107, KF530108, KF530109, KF530110, KF530111, KF530112, KF530113, KF530114, KF530115, KF530116, KF530117, KF530118, KF530119, KF530120, KF530121, KF530122, KF530123, KF530124, KF530125, KF530126, KF530127, KF530129, KF530130, KF530131, KF530132, KF530133, KF530134, KF530135, KF530136, KF530270, KF530271, KF569996, KF574761, KF600612, KF600613, KF600620, KF600627, KF600628, KF600630, KF600632, KF600634, KF600644, KF600645, KF600647, KF600651, KF600652, KF636752, KF650370, KF650371, KF650372, KF650373, KF650374, KF650375, KF663559, KF663560, KF663561, KF668605, KF686338, KF686339, KF686340, KF686341, KF686342, KF686343, KF686344, KF686345, KF686346, KF696629, KF745068, KF760557, KF761675, KF793824, KF793825, KF793826, KF804028, KF840537, KF850450, KF853202, KF906249, KF906250, KF906251, KF917527, KF923886, KF923887, KF923888, KF923889, KF923890, KF923891, KF923892, KF923893, KF923894, KF923895, KF923896, KF923897, KF923898, KF923899, KF923900, KF923901, KF923902, KF923903, KF923904, KF923905, KF923906, KF923907, KF923908, KF923909, KF923910, KF923911, KF923912, KF923913, KF923914, KF923915, KF923916, KF923917, KF923918, KF923919, KF923920, KF923921, KF923922, KF923923, KF923924, KF923925, KF931628, KF958702, KF961221, KF961222, KJ020932, KJ128295, KJ1135013, KJ156866, KJ156869, KJ156874, KJ156881, KJ156910, KJ156934, KJ156944, KJ156949, KJ156952, KJ158152, KJ184549, KJ196348, KJ361500, KJ361501, KJ361502, KJ361503, KJ399978, KJ408801, KJ425485, KJ425486, KJ425487, KJ425488, KJ425489, KJ425490, KJ425491, KJ425492, KJ425493, KJ425494, KJ425495, KJ425496, KJ425497, KJ425498, KJ425499, KJ425500, KJ425501, KJ425502, KJ425503, KJ425504, KJ425505, KJ425506, KJ425507, KJ425508, KJ425509, KJ425510, KJ425511, KJ425512, KJ435283, KJ435284, KJ435285, KJ435286, KJ462462, KJ473795, KJ473796, KJ473797, KJ473798, KJ473799, KJ473800, KJ473806, KJ473807, KJ473808, KJ473809, KJ473810, KJ473811, KJ473812, KJ473813, KJ473814, KJ473815, KJ473816, KJ473820, KJ473821, KJ473822, KJ477102, KJ477103, KJ481931, KJ526096, KJ556336, KJ567050, KJ569769, KJ584355, KJ584356, KJ584357, KJ584358, KJ584359, KJ584361, KJ588062, KJ588063, KJ588064, KJ601777, KJ601778, KJ601779, KJ601780, KJ614529, KJ620016, KJ623926, KJ645635, KJ645636, KJ645637, KJ645638, KJ645639, KJ645640, KJ645641, KJ645642, KJ645643, KJ645644, KJ645645, KJ645646, KJ645647, KJ645648, KJ645649, KJ645650, KJ645651, KJ645652, KJ645653, KJ645654, KJ645655, KJ645656, KJ645657, KJ645658, KJ645659, KJ645660, KJ645661, KJ645662, KJ645663, KJ645664, K1645665, KJ645666, KJ645667, KJ645668, KJ645669, KJ645670, KJ645671, KJ645672, KJ645673, KJ645674, KJ645675, KJ645676, KJ645677, KJ645678, KJ645679, KJ645680, KJ645681, KJ645682, K645683, K1645684, KM645685, KJ645686, KJ645687, KJ645688, KJ645689, KJ645690, KJ645691, KJ645692, KJ645693, KJ645694, KJ645695, KJ645696, KJ645697, KJ645698, KJ645699, KJ645700, KJ645701, KJ645702, KJ645703, KJ645704, KJ645705, KJ645706, KJ645707, KJ645708, KJ650098, KJ650295, KJ6502%, KJ650297, KJ662670, KJ713295, KJ713296, KJ713297, KJ713298, KJ713299, KJ769231, KJ777677, KJ777678, KJ778615, KJ778616, KJ813439, KJ829365, KJ958218, KJ958219, KJ960178, KJ960179, KJ960180, KM012168, KM015348, KM027255, KM027256, KM027257, KM027258, KM027259, KM027260, KM027261, KM027262, KM052365, KM077139, KM089829, KM189367, KM210277, KM210278, KM213963, KM242131, KM347965, KM349742, KM349743, KM349744, KM392224, KM392225, KM392226, KM392227, KM392228, KM392229, KM392230, KM392231, KM392232, KM403155, KM454473, KM586818, KM609203, KM609204, KM609205, KM609206, KM609207, KM609208, KM609209, KM609210, KM609211, KM609212, KM609213, KM820765, KM887144, KM975735, KM975736, KM975737, KM975738, KM975739, KM975740, KM975741, KP036502, KP036503, KP036504, KP036505, KP118880, KP118881, KP118882, KP118883, KP118884, KP118885, KP118886, KP118887, KP118888, KP118889, KP118890, KP118891, KP118892, KP118893, KP118894, KP143507, KP143508, KP143509, KP143510, KP143511, KP143512, KP162057, KP198610, KP198611, KP202848, KP209306, KP209307, KP209308, KP209309, KP209310, KP209311, KP209312, KP209313, KP223131, KP343691, KP403802, KP403954, KP641661, KP641662, KP641663, KP662631, KP688354, KP719927, KP719928, KP719929, KP719930, KP719931, KP719932, KP719933, KP728470, KP757890, KP757891, KP757892, KP765609, KP780179, KP790143, KP790144, KP790145, KP790146, KP868572, KP868573, KP886808, KP886809, KP887098, KP890336, KP981395, KP981644, KR003452, KR011263, KR011264, KR011265, KR011266, KR011756, KR061458, KR061459, KR078299, KR078300, KR095279, KR131621, KR150443, KR153325, KR153326, KR231009, KR265759, KR265760, KR265761, KR265762, KR265763, KR265764, KR265765, KR265766, KR265767, KR265768, KR265769, KR265770, KR265771, KR265772, KR265773, KR265774, KR265775, KR265776, KR265777, KR265778, KR265779, KR265780, KR265781, KR265782, KR265783, KR265784, KR265785, KR265786, KR265787, KR265788, KR265789, KR265790, KR265791, KR265792, KR265793, KR265794, KR265795, KR265796, KR265797, KR265798, KR265799, KR265800, KR265801, KR265802, KR265803, KR265804, KR265805, KR265806, KR265807, KR265808, KR265809, KR265810, KR265811, KR265812, KR265813, KR265814, KR265815, KR265816, KR265817, KR265818, KR265819, KR265820, KR265821, KR265822, KR265823, KR265824, KR265825, KR265826, KR265827, KR265828, KR265829, KR265830, KR265831, KR265832, KR265833, KR265834, KR265840, KR265841, KR265842, KR265843, KR265844, KR265845, KR265846, KR265847, KR265848, KR265849, KR265850, KR265851, KR265852, KR265853, KR265854, KR265855, KR265856, KR265857, KR265858, KR265859, KR265860, KR265861, KR265862, KR265863, KR265864, KR265865, KR270796, KR608272, KR610991, KR610992, KR610993, KR610994, KR809885, KR818832, KR818833, KR822424, KR873431, KR873434, KR873435, KR902510, KT006149, KT021227, KT021228, KT021229, KT021230, KT021231, KT021232, KT021233, KT021234, KT026453, KT026454, KT026455, KT026456, KT029139, KT121572, KT121573, KT121574, KT121575, KT121576, KT121577, KT121578, KT121579, KT121580, KT121581, KT156560, KT156561, KT199103, KT203557, KT225476, KT253269, KT253270, KT253271, KT253272, KT253324, KT253325, KT253326, KT253327, KT253328, KT266822, KT266906, KT323979, KT323980, KT326819, KT336560, KT368824, KT368825, KT368826, KT368827, KT368828, KT368829, KT368830, KT368831, KT368832, KT368833, KT368834, KT368835, KT368836, KT368837, KT368838, KT368839, KT368840, KT368841, KT368842, KT368843, KT368844, KT368845, KT368846, KT368847, KT368848, KT368849, KT368850, KT368851, KT368852, KT368853, KT368854, KT368855, KT368856, KT368857, KT368858, KT368859, KT368860, KT368861, KT368862, KT368863, KT368864, KT368865, KT368866, KT368867, KT368868, KT368869, KT368870, KT368871, KT368872, KT368873, KT368874, KT368875, KT368876, KT368877, KT368878, KT368879, KT368880, KT368881, KT368882, KT368883, KT368884, KT368885, KT368886, KT368887, KT368888, KT368889, KT368890, KT368891, KT368892, KT368893, KT368894, KT368895, KT368896, KT368897, KT368898, KT368899, KT368900, KT368901, KT368902, KT368903, KT368904, KT368905, KT368906, KT368907, KT368908, KT368909, KT368910, KT368911, KT368912, KT368913, KT368914, KT368915, KT368916, KT374050, KT374051, KT374052, KT374053, KT374054, KT374055, KT374056, KT374057, KT381613, KT381875, KT444582, KT591944, KT696544, KT736031, KT736032, KT751244, KT779555, KT779556, KT806044, KT806045, KT806046, KT806047, KT806048, KT806049, KT806051, KT806052, KT806053, KT806054, KT806055, KT852992, KT860508, KT861627, KT861628, KT877350, KT877351, KT886454, KT941120, KT946798, KU051641, KU051649, KU131570, KU182964, KU182965, KU215419, KU215420, KU215421, KU215422, KU215423, KU215424, KU215425, KU215426, KU215427, KU215428, KU242423, KU242424, KU252649, KU291448, KU291449, KU297956, KU308549, KU317090, KU356856, KU361187, KU361188, KU380331, KU521535, KU558701, KU558702, KU569509, KU646831, KU664503, KU665558, KU710264, KU710265, KU729220, KU762338, KU847996, KU851859, KU851860, KU851861, KU851862, KU851863, KU851864, KU886219, KU893861, KU893869, KU893870, KU893871, KU893872, KU893873, KU900738, KU900739, KU900740, KU900741, KU900742, KU900743, KU900744, KU973692, KU975389, KU981059, KU981060, KU981061, KU981062, KU982966, KU982967, KU982968, KU982969, KU982970, KU982971, KU982972, KU982973, KU982974, KU982975, KU982976, KU982977, KU982978, KU982979, KU982980, KU982981, KU984334, KX016034, KX022602, KX022603, KX022604, KX022605, KX034094, KX034095, KX034096, KX034097, KX034098, KX034099, KX034100, KX058031, KX058032, KX058033, KX058075, KX064280, KX066126, KX077987, KX083668, KX108937, KX108938, KX108939, KX108940, KX108941, KX108942, KX108943, KX108944, KX108945, KX108946, KX118627, KX154684, KX154685, KX154686, KX154687, KX154688, KX154689, KX154690, KX154691, KX154692, KX154693, KX154694, KX179500, KX185056, KX185057, KX185058, KX185059, KX219791, KX219792, KX219793, KX219794, KX219795, KX219796, KX219797, KX219798, KX219799, KX219800, KX219801, KX236000, KX236001, KX236002, KX236003, KX236004, KX236005, KX236006, KX236007, KX236008, KX236009, KX236010, KX236011, KX236012, KX236013, KX236014, KX236015, KX236016, KX247127, KX247128, KX247129, KX247130, KX252772, KX252773, KX252774, KX252775, KX252776, KX252777, KX252778, KX252779, KX252780, KX252781, KX252782, KX252783, KX252784, KX252785, KX252786, KX252787, KX252788, KX252789, KX252790, KX252791, KX258195, KX259248, KX259249, KX259250, KX259251, KX259252, KX259253, KX259254, KX259255, KX259256, KX259257, KX266757, KX272465, KX275390, KX275391, KX275392, KX275393, KX275394, KX289955, KX302860, KX302861, KX302862, KX302863, KX302864, KX302865, KX302866, KX302867, KX302868, KX302869, KX302870, KX302871, KX302872, KX302873, KX302874, KX302875, KX344031, KX348114, KX348115, KX348116, KX348117, KX364290, KX364291, KX364292, KX364293, KX364294, KX364295, KX364296, KX364297, KX364298, KX364299, KX364300, KX372249, KX372250, KX375805, KX375806, KX375807, KX375808, KX389094, KX400753, KX425847, KX432213, KX434788, KX434789, KX434790, KX442564, KX442565, KX443143, KX499468, KX512809, KX512810, KX534205, KX534206, KX538964, KX538965, KX538966, KX538967, KX538968, KX538969, KX538970, KX538971, KX538972, KX538973, KX538974, KX538975, KX538976, KX538977, KX538978, KX538979, KX550281, KX574227, KX580953, KX580958, KX640829, KX683006, KX722529, KX722530, KX791060, KX812523, KX812524, KX834351, KX834352, KX839246, KX839247, KX839248, KX839249, KX839250, KX839251, KX883635, KX900393, KX900394, KX900395, KX90039, KX900397, KX900398, KX900399, KX900400, KX900401, KX900402, KX900403, KX900404, KX900405, KX900406, KX900407, KX900408, KX900409, KX900410, KX900411, KX964649, KX981440, KX982264, KX998969, KY007139, KY007140, KY014281, KY014282, KY019623, KY019624, KY047602, KY063616, KY063617, KY063618, KY065120, KY070587, KY073744, KY073745, KY073746, KY073747, KY073748, KY1278, KY292377, KY293677, KY293678, KY352407, KY354363, KY354364, KY363867, KY363868, KY364365, KY369905, KY369906, KY369907, KY369908, KY369909, KY369910, KY369911, KY369912, KY369913, KY369914, KY370043, KY370044, KY370045, KY370046, KY370047, KY370048, KY370049, KY370050, KY370051, KY370052, KY370053, KY406735, KY407556, KY407557, KY407558, KY417142, KY417143, KY417144, KY417145, KY417146, KY417147, KY417148, KY417149, KY417150, KY417151, KY417152, KY419103, KY419104, KY419105, KY419106, KY419107, KY419109, KY419110, KY419111, KY419112, KY419113, KY420075, KY421672, KY421673, KY486713, KY486714, KY499261, KY499262, KY513724, KY513725, KY554967, KY554968, KY554969, KY554970, KY554971, KY554972, KY554973, KY554974, KY554975, KY566209, KY566210, KY566211, KY581684, KY581685, KY581686, KY581687, KY581688, KY581689, KY581690, KY581691, KY581692, KY581693, KY581694, KY581695, KY581696, KY581697, KY581698, KY581699, KY581700, KY620116, KY621348, KY626044, KY626045, KY649107, KY673148, KY673149, KY674914, KY674915, KY674916, KY674917, KY674918, KY674919, KY674920, KY674921, KY674941, KY674942, KY674943, KY684759, KY684760, KY688118, KY688119, KY688120, KY688121, KY688122, KY688123, KY688124, KY689142, KY770850, KY770851, KY770858, KY770859, KY770860, KY776700, KY776701, KY793536, KY799179, KY799582, KY805845, KY805846, KY825240, KY825241, KY825242, KY825243, KY829118, KY926512, KY928065, KY929405, KY929406, KY933089, KY933090, KY938558, KY963963, KY967356, KY967357, KY9967358, KY967359, KY967360, KY967361, KY983583, KY983585, KY983586, KY983587, KY983588, KY994645, KY996417, LC022792, LC053455, LC061272, LC061273, LC061274, LC063810, LC063811, LC063812, LC063813, LC063814, LC063815, LC063816, LC063817, LC063818, LC063819, LC063820, LC063821, LC063822, LC063823, LC063824, LC063825, LC063826, LC063827, LC063828, LC063829, LC063830, LC063831, LC063832, LC063833, LC063834, LC063835, LC063836, LC063837, LC063838, LC063839, LC063840, LC063841, LC063842, LC063843, LC063844, LC063845, LC063846, LC063847, LC119077, LC215871, LC216914, LC216915, LC260038, LC260039, LC260040, LC260041, LC260042, LC260043, LC260044, LC260045, LC364342, LC364343, LC364344, LC364345, LC364346, LC469308, LC494126, LC494127, LC494128, LC494129, LC494130, LC494131, LC494132, LC494133, LC494134, LC494135, LC494136, LC494137, LC494138, LC494139, LC494140, LC494141, LC494142, LC494143, LC494144, LC494145, LC494146, LC494147, LC494148, LC494149, LC494150, LC494151, LC494152, LC494153, LC494154, LC494155, LC494156, LC494157, LC494158, LC494159, LC494160, LC494161, LC494162, LC494163, LC494164, LC494165, LC494166, LC494167, LC494168, LC494169, LC494170, LC494171, LC494172, LC494173, LC494174, LC494175, LC494176, LC494177, LC494178, LC494179, LC494180, LC494181, LC494182, LC494183, LC494184, LC494185, LC494186, LC494187, LC494188, LC494189, LC494190, LC494191, LC494192, LG076103, LG076104, LG076105, LM645057, LM645058, LN610099, LP731408, LP731409, LP731410, LP731411, LP731412, LP731413, LP731414, LP731415, LP731416, LP731435, LP731436, LP731437, LP731438, LP731439, LP731459, LP731460, LP731461, LP731462, LP731463, LP731464, LP731465, LP731466, LP731467, LP731468, LP731469, LP731470, LP731471, LP731472, LP731473, LP731474, LP731475, LP731476, LP731477, LP731478, LP963762, LP994923, LQ068527, LQ068536, LQ068537, LQ110721, LQ110722, LQ289146, LQ302036, LQ410511, LQ410512, LQ410513, LQ410514, LQ410515, LQ410516, LQ410517, LQ410518, LQ410519, LQ905109, LT545990, LT897799, LT898408, LT898409, LT898410, LT898411, LT898412, LT898413, LT898414, LT898415, LT898416, LT898417, LT898418, LT898420, LT898421, LT898423, LT898425, LT898426, LT898427, LT898430, LT898431, LT898432, LT898433, LT898435, LT898436, LT898438, LT898439, LT898440, LT898441, LT898443, LT898444, LT898445, LT898446, LT898447, LT900498, LT900499, LT900500, LT900501, LT900502, LT905450, LT905451, LT906581, LT906582, LT906620, LY411674, LY411680, LY411681, LY505956, LY611929, LY646142, LY646143, M95169, MA347646, MA347647, MA347648, MA347649, MA347650, MA347651, MA347652, MA347653, MA347654, MA347655, MA347656, MA347657, MA347658, MA347659, MA347660, MA347661, MA347662, MA347663, MA347664, MA347665, MA347666, MA347667, MA347668, MA347669, MA347670, MA347671, MA347672, MA347673, MA347674, MA347675, MA347676, MA347677, MA347678, MA347679, MA741906, MA741912, MA741913, MA765825, MF000457, MF000458, MF000459, MF000460, MF041982, MF083115, MF094681, MF094682, MF094683, MF094684, MF094685, MF094686, MF094687, MF094688, MF095123, MF113046, MF167434, MF280390, MF281416, MF314143, MF346935, MF370205, MF373643, MF374983, MF374984, MF374985, MF375374, MF421319, MF421320, MF431742, MF431743, MF462814, MF508703, MF542265, MF577027, MF593268, MF593473, MF593476, MF598594, MF598595, MF598596, MF598597, MF598598, MF598599, MF598600, MF598601, MF598602, MF598603, MF598604, MF598605, MF598606, MF598607, MF598608, MF598609, MF598610, MF598611, MF598612, MF598613, MF598614, MF598615, MF598616, MF598617, MF598618, MF598619, MF598620, MF598621, MF598622, MF598623, MF598624, MF598625, MF598626, MF598627, MF598629, MF598630, MF598631, MF598632, MF598633, MF598634, MF598635, MF598636, MF598637, MF598638, MF598639, MF598640, MF598641, MF598643, MF598644, MF598645, MF598646, MF598647, MF598648, MF598649, MF598650, MF598651, MF598652, MF598653, MF598654, MF598655, MF598656, MF598657, MF598658, MF598659, MF598660, MF598661, MF598662, MF598663, MF598664, MF598665, MF598666, MF598667, MF598668, MF598669, MF598670, MF598671, MF598672, MF598673, MF598674, MF598675, MF598676, MF598677, MF598678, MF598679, MF598680, MF598681, MF598682, MF598683, MF598684, MF598685, MF598686, MF598687, MF598688, MF598689, MF598690, MF598691, MF598692, MF598693, MF598694, MF598695, MF598696, MF598697, MF598698, MF598699, MF598700, MF598701, MF598702, MF598703, MF598704, MF598705, MF598706, MF598707, MF598708, MF598709, MF598710, MF598711, MF598712, MF598713, MF598714, MF598715, MF598716, MF598717, MF598719, MF598720, MF598721, MF598722, MF618252, MF618253, MF642322, MF642323, MF642324, MF642325, MF737355, MF769416, MF769417, MF769418, MF769419, MF769420, MF769421, MF769422, MF769423, MF769424, MF769425, MF769426, MF769427, MF769428, MF769429, MF769430, MF769431, MF769432, MF769433, MF769434, MF769435, MF769436, MF769437, MF769438, MF769439, MF769440, MF769441, MF769442, MF769443, MF769444, MF782686, MF782687, MF807951, MF807952, MF882923, MF924724, MF924725, MG011340, MG011341, MG011342, MG011343, MG011344, MG011345, MG011346, MG011347, MG011348, MG011349, MG011350, MG011351, MG011352, MG011353, MG011354, MG011355, MG011356, MG011357, MG011358, MG011359, MG011360, MG011361, MG011362, MG021194, MG021451, MG021452, MG197709, MG197710, MG197711, MG197712, MG197713, MG197714, MG197715, MG197716, MG197717, MG197718, MG197719, MG197720, MG197721, MG197722, MG197723, MG197727, MG233398, MG242062, MG334554, MG334555, MG366483, MG366880, MG366881, MG366882, MG366883, MG428699, MG428701, MG428702, MG428703, MG428704, MG428705, MG428706, MG448607, MG470650, MG517474, MG518518, MG520075, MG520076, MG546330, MG546331, MG546687, MG546688, MG546689, MG546690, MG557844, MG596802, MG596803, MG605090, MG605091, MG693168, MG693169, MG693170, MG693172, MG738154, MG738155, MG742313, MG757138, MG757139, MG757140, MG757141, MG757142, MG757593, MG757594, MG757595, MG757596, MG757597, MG757598, MG757599, MG757600, MG757601, MG757602, MG757603, MG757604, MG757605, MG762674, MG763935, MG772808, MG772933, MG772934, MG781192, MG812375, MG812376, MG812377, MG812378, MG832584, MG837011, MG837012, MG837058, MG837130, MG837131, MG837132, MG837133, MG893511, MG912595, MG912596, MG912597, MG912598, MG912599, MG912600, MG912601, MG912602, MG912603, MG912604, MG912605, MG912606, MG912607, MG912608, MG913342, MG913343, MG916901, MG916902, MG916903, MG916904, MG923466, MG923467, MG923468, MG923469, MG923470, MG923471, MG923472, MG923473, MG923474, MG923475, MG923476, MG923477, MG923478, MG923479, MG923480, MG923481, MG923574, MG977444, MG977445, MG977447, MG977449, MG977451, MG977452, MG983755, MH004412, MH004413, MH004414, MH004415, MH004416, MH004417, MH004418, MH004419, MH004420, MH004421, MH006957, MH006958, MH006959, MH006960, MH006961, MH006962, MH006963, MH006964, MH006965, MH013216, MH013462, MH013463, MH013464, MH013465, MH013466, MH020185, MH021175, MH029552, MH043952, MH043953, MH043954, MH043955, MH052681, MH052682, MH052683, MH052684, MH052685, MH052687, MH052688, MH052689, MH056657, MH056658, MH061336, MH061337, MH061338, MH061339, MH061340, MH061341, MH061342, MH061343, MH107321, MH107322, MH1117940, MH121121, MH181793, MH243316, MH243318, MH243319, MH259485, MH259486, MH306207, MH310909, MH310910, MH310911, MH310912, MH371127, MH395139, MH432120, MH454272, MH532440, MH539766, MH539771, MH539772, MH581489, MH593900, MH615810, MH687934, MH687935, MH687936, MH687937, MH687938, MH687939, MH687940, MH687941, MH687942, MH687943, MH687944, MH687945, MH687946, MH687947, MH687948, MH687949, MH687950, MH687951, MH687952, MH687953, MH687954, MH687955, MH687956, MH687957, MH687958, MH687959, MH687960, MH687961, MH687962, MH687963, MH687964, MH687965, MH687966, MH687967, MH687968, MH687969, MH687970, MH687971, MH687972, MH687973, MH687974, MH687976, MH687977, MH687978, MH697599, MH708123, MH708124, MH708125, MH708243, MH708895, MH715491, MH726362, MH726363, MH726364, MH726365, MH726366, MH726367, MH726368, MH726369, MH726370, MH726371, MH726372, MH726373, MH726374, MH726375, MH726376, MH726377, MH726378, MH726379, MH726380, MH726381, MH726382, MH726383, MH726384, MH726385, MH726386, MH726387, MH726388, MH726389, MH726390, MH726391, MH726392, MH726393, MH726394, MH726395, MH726396, MH726397, MH726398, MH726399, MH726400, MH726401, MH726402, MH726403, MH726404, MH726405, MH726406, MH726407, MH726408, MH734114, MH734115, MH748550, MH779856, MH779857, MH779858, MH779859, MH779860, MH810163, MH817484, MH822886, MH878976, MH891584, MH891585, MH891586, MH891587, MH891588, MH891589, MH891590, MH910099, MH924835, MH938448, MH938449, MH938450, MH940245, MK005882, MK032177, MK032178, MK032179, MK032180, MK032181, MK032689, MK032690, MK032691, MK032692, MK039552, MK039553, MK052676, MK062179, MK062180, MK062181, MK062182, MK062183, MK062184, MK071267, MK071619, MK071620, MK071621, MK071622, MK071623, MK071624, MK071625, MK071626, MK071627, MK071628, MK071629, MK071630, MK071631, MK071632, MK071633, MK071634, MK071635, MK071636, MK071637, MK071638, MK071639, MK129253, MK138353, MK138516, MK140811, MK140812, MK140813, MK140814, MK142676, MK163627, MK167038, MK204393, MK204411, MK211169, MK211369, MK211370, MK211371, MK211372, MK211373, MK211374, MK211375, MK211376, MK211377, MK211378, MK211379, MK217372, MK217373, MK217374, MK217375, MK250953, MK280984, MK288006, MK303619, MK303620, MK303621, MK303622, MK303623, MK303624, MK303625, MK309398, MK329221, MK330604, MK330605, MK334043, MK334044, MK334045, MK334046, MK334047, MK355396, MK357908, MK357909, MK359255, MK392335, MK409657, MK409658, MK409659, MK423876, MK423877, MK462243, MK462244, MK462245, MK462246, MK462247, MK462248, MK462249, MK462250, MK462251, MK462252, MK462253, MK462254, MK462255, MK462256, MK472067, MK472068, MK472069, MK472070, MK472071, MK482396, MK482397, MK483839, MK492263, MK558089, MK559454, MK559455, MK559456, MK564474, MK564475, MK572803, MK574042, MK574043, MK581200, MK581201, MK581202, MK581203, MK581204, MK581205, MK581206, MK581207, MK581208, MK584552, MK606368, MK606369, MK644086, MK644601, MK644602, MK644603, MK644604, MK644605, MK651076, MK673545, MK679660, MK690502, MK702008, MK720944, MK720945, MK720946, MK728875, MK796238, MK796425, MK841494, MK841495, MK862249, MK878536, MK907286, MK907287, MK937828, MK937829, MK937830, MK937831, MK937832, MK937833, MK967708, MK977618, MK993519, MN025260, MN026164, MN037494, MN056942, MN065811, MN096598, MN120513, MN120514, MN165107, MN197549, MN249445, MN306018, MN306036, MN306040, MN306041, MN306042, MN306043, MN306046, MN306053, MN310476, MN310478, MN315264, MN365232, MN365233, MN369046, MN486588, MN507638, MN512434, MN512435, MN512436, MN512437, MN512438, MN514962, MN514963, MN514964, MN514965, MN514966, MN514967, MN599049, MN611517, MN611518, MN611519, MN611520, MN611521, MN611522, MN611523, MN611524, MN611525, MN723542, MN723543, MN723544, MN996532, NC_001451, NC_001846, NC_002306, NC_002645. NC_003045, NC_003436, NC_004718, NC_005831, NC_006213, NC_006577, NC_009019, NC_009020, NC_009021, NC_009657, NC_009988, NC_010437, NC_010438, NC_010646, NC_010800, NC_011547, NC_011549, NC_011550, NC_012936, NC_014470, NC_016990, NC_016991, NC_016992, NC_016993, NC_016994, NC_016995, NC_016996, NC_017083, NC_018871, NC_019843, NC_022103, NC_022643, NC_023760. NC_025217, NC_026011, NC_028752, NC_028806, NC_028811, NC_028814, NC_028824, NC_028833, NC_030292, NC_030886, NC_032107, NC_032730, NC_034440, NC_034972, NC_038294, NC_038861. NC_039207, NC_039208, or U00735. In some embodiments, the reference viral genome of the GenBank Access IDs described herein is associated with any one of the alphacoronavirus, betacoronavirus, deltacoronavirus, or gammacoronavirus described herein. herein In some embodiments, the crRNA complements and binds to the reference viral genome of the GenBank Access IDs described herein. Non-limiting examples of the reference viral genome or a fragment thereof can include SEQ ID Nos listed in Table 4 and SEQ ID Nos: 13101-13122.

[0233] In some embodiments, the viral genomes being targeted, cleaved, or degraded by the systems and methods described herein can be either coding regions (i.e. viral genes), non-coding regions, or open reading frames. In some embodiments, the viral genomes being targeted, cleaved, or degraded by the systems and methods described can span across coding regions, non-coding regions, and opening reading frames. Exemplary viral coding regions, viral genes, or viral open reading frames that can be targeted and bound by the systems and methods described herein include orf1a, orf1ab, S (spike), 3a, 3b, E (envelope protein), M (matrix protein), p6, 7a, 7b, 8b, 9b, N (nucleocapsid), orf14, nsp1 (leader protein), nsp2, nsp3, nsp4, nsp5 (3C-like proteinase), nsp6, nsp7, nsp8, nsp9, nsp10 (growth-factor-like protein), nsp12 (RNA-dependent RNA polymerase, or RdRP), nsp13 (RNA 5′-triphosphatase), nsp14 (3′-to-5′ exonuclease), nsp15 (endoRNAse), and nsp16 (2′-O-ribose methyltransferase).

[0234] In some embodiments, the viral genomes, viral genes, or viral gene segments being targeted, cleaved, or degraded by the systems and methods described herein can be viral genomes, viral genes, or viral gene segments of influenza viruses, any type thereof, any subtype thereof, any clade thereof, or any sub-clade thereof. In some embodiments, the influenza virus is selected from the genera consisting of Influenza virus A, Influenza virus B, Influenza virus C and Influenza virus D. In further embodiments, the influenza A virus is of the subtype H1N1, H1N2, H2N2 or H3N2. In further embodiments, the influenza B virus of the B/Yamagata/16/88-like lineage or the B/Victoria/2/87-like lineage.

[0235] In some embodiments, the viral genomes, viral genes, or viral gene segments being targeted by the systems and the methods described herein can be selected from any genome registered on GenBank (as of Mar. 12, 2020). In some embodiments, the viral genomes, viral genes, or viral gene segments being targeted by the systems and the methods described herein can be selected from any genome (i.e. thousands of influenza A viral (IAV) genome sequences from epidemic and pandemic strains publicly available) registered on a public database (as of Mar. 12, 2020), such as influenza research database (IRD). In some embodiments, the viral genomes, viral genes, or viral gene segments being targeted by the systems and the methods described herein can be an influenza virus, such as influenza A, influenza B, influenza C, and influenza D. In some embodiments, the viral genomes, viral genes, or viral gene segments being targeted by the systems and the methods described herein can be an influenza A. Examples of an influenza can include, but are not limited to, influenza A types H1, H3, H5, H7, and H9 viruses. In some embodiments, the viral genomes, viral genes, or viral gene segments being targeted by the systems and the methods described herein can be selected from any strain of Column 1 of Table 6.

TABLE 6
Exemplary Influenza Strain Counts of Segment 1 Sequences

| Flu Strain Analyzed | Segment 1 Sequences Analyzed |
|---|---|
| Unknown | 2 |
| N5 | 1 |
| H10N8 | 111 |
| H10N9 | 43 |
| H10N1 | 63 |
| H10N2 | 46 |
| H10N3 | 110 |
| H10N4 | 63 |
| H10N5 | 132 |
| H10N6 | 63 |
| H10N7 | 631 |
| H4Nx | 1 |
| H18N11 | 4 |
| H6N3 | 14 |
| H2N4 | 2 |
| H2N5 | 22 |
| H2N6 | 5 |
| H2N7 | 32 |
| H2N1 | 46 |
| H2N2 | 166 |
| H2N3 | 242 |
| H2N8 | 15 |
| H2N9 | 77 |
| H8N8 | 2 |
| H6N4 | 13 |
| H8N6 | 1 |
| H8N4 | 160 |
| HxN1 | 1 |
| H8N2 | 3 |
| H8N3 | 1 |
| H8N1 | 1 |
| H14N7 | 2 |
| H7 | 3 |
| H3N2v | 1 |
| H17N10 | 3 |
| H9N6 | 5 |
| H11 | 7 |
| H12 | 1 |
| H91 | 1 |
| Mixed | 34 |
| H9N8 | 6 |
| H14N2 | 2 |
| H3 | 59 |
| H1 | 22 |
| H6 | 2 |
| H5N6 | 349 |
| H4 | 2 |
| H5 | 4 |
| H5N7 | 19 |
| H4N3 | 20 |
| mixed | 1221 |
| H4N1 | 14 |
| H4N6 | 1410 |
| H11N7 | 10 |
| H5N2 | 1082 |
| H3N9 | 14 |
| H3N8 | 1538 |
| H12N9 | 5 |
| H4N4 | 21 |
| H3N1 | 97 |
| H3N3 | 31 |
| H3N2 | 18955 |
| H3N5 | 21 |
| H3N4 | 5 |
| H3N7 | 26 |
| H3N6 | 239 |
| H4N8 | 254 |
| H4N9 | 26 |
| H5N9 | 37 |
| H5N8 | 238 |
| H4N2 | 169 |
| unknown | 4 |
| H5N5 | 43 |
| H5N4 | 5 |
| H5N3 | 118 |
| H4N7 | 7 |
| H5N1 | 2233 |
| H4N5 | 14 |
| H6N8 | 228 |
| H6N9 | 10 |
| H7N9 | 870 |
| H7N8 | 30 |
| H7N5 | 5 |
| H6N1 | 416 |
| H7N7 | 287 |
| H7N6 | 60 |
| H7N1 | 157 |
| H6N5 | 80 |
| H6N6 | 232 |
| H6N7 | 5 |
| H?N4 | 2 |
| H12N6 | 6 |
| H11N8 | 28 |
| N8 | 4 |
| H3Nx | 2 |
| H15N6 | 1 |
| H7N4 | 32 |
| N1 | 13 |
| N2 | 10 |
| N3 | 2 |
| N4 | 3 |
| H6N2 | 566 |
| N6 | 12 |
| N7 | 2 |
| H1N9 | 61 |
| H1N8 | 36 |
| H1N3 | 74 |
| H1N2 | 1781 |
| H1N1 | 15575 |
| H1N7 | 10 |
| H1N6 | 41 |
| H1N5 | 13 |
| H1N4 | 9 |
| H9N3 | 4 |
| H9N2 | 1579 |
| H9N1 | 27 |
| H9N7 | 9 |
| H7N3 | 678 |
| H9N5 | 21 |
| H9N4 | 2 |
| H9N9 | 15 |
| H7N2 | 269 |
| H11N5 | 9 |
| H12N8 | 13 |
| H11N6 | 15 |
| H11N1 | 38 |
| H11N3 | 44 |
| H11N2 | 131 |
| H12N2 | 5 |
| H12N3 | 20 |
| H12N1 | 16 |
| H11N9 | 411 |
| H12N7 | 9 |
| H12N4 | 44 |
| H12N5 | 215 |
| H1N2v | 6 |
| H16N8 | 1 |
| H16N3 | 256 |
| H15N9 | 8 |
| H15N8 | 1 |
| H14N8 | 2 |
| H14N4 | 2 |
| H14N5 | 4 |
| H14N6 | 5 |
| H15N2 | 1 |
| H15N5 | 6 |
| H15N4 | 1 |
| H15N7 | 1 |
| H14N3 | 19 |
| H13N6 | 238 |
| H13N3 | 3 |
| H13N2 | 91 |
| H13N9 | 67 |
| H13N8 | 119 |

[0236] In some embodiments, the target viral genome segment comprises a sequence having at least 90% sequence identity to a sequence selected from SEQ ID NOs:13501-13548. In some embodiments, the target viral genome segment comprises a sequence having at least 95% sequence identity to a sequence selected from SEQ ID NOs:13501-13548. In some embodiments, the target viral genome segment comprises a sequence having 100% sequence identity to a sequence selected from SEQ ID NOs:13501-13548.

[0237] In some embodiments, the target viral genome segment comprises at least one non-coding region or a fragment thereof. The at least one non-coding region may be a 5′ end or a 3′ end of a segment (such as Segment I, Segment II, Segment 111, Segment IV, Segment V, Segment VI, Segment VII, or Segment VIII) that comprise the influenza A viral (IAV) segmented RNA genome. The at least one non-coding region may have a length of, or of about, 10, 11, 12, 13, 14, 15, 16, 17, 18, 19, 20, 21, 22, 23, 24, or 25 base pairs (bp), or any range between any two of the foregoing values. The at least one non-coding region may have a length of from 10 to 25, from 10 to 22, from 10 to 20, or from 12 to 18, or from 14 to 17 bp. The at least one non-coding region may be associated with packaging an influenza A viral RNA into a budding virion. One of skill in the art will understand that a coding region adjacent to the at least one non-coding region (NCR) may serve not only to encode one or more viral proteins, but also as a packing signal for an influenza viral genome segment. One of skill in the art will also understand that the at least one non-coding region (NCR) may by itself be shown to be sufficient for packaging an influenza A viral RNA into a budding virion, or that the efficiency of packaging increases when at least a portion of a coding region adjacent to the at least one NCR is included. In some embodiments, the target viral genome segment further comprises a fragment of a coding region adjacent to the at least one non-coding region.

[0238] In some embodiments, the viral genomes being targeted, cleaved, or degraded by the systems and methods described herein can be either coding regions (i.e. viral genes, or viral gene segments), non-coding regions, or open reading frames. In some embodiments, the viral genomes being targeted, cleaved, or degraded by the systems and methods described can span across coding regions, non-coding regions, and opening reading frames.

[0239] In some embodiments, the at least one heterologous RNA polynucleotide comprising a nucleic acid sequence of any one SEQ ID NOs: 13601-13606 targets an endogenous gene of the cell being infected by any one of strain of the virus described herein. In some embodiments, the endogenous gene is a member of the peptidase family M1 such as aminopeptidase N (ANPEP), aminopeptidase A, leukotriene A4 hydrolase, Ape2 aminopeptidase, Aap1′ aminopeptidase, pyroglutamyl-peptidase II, cytosol alanyl aminopeptidase, cystinyl aminopeptidase, aminopeptidase G, aminopeptidase B, aminopeptidase Ey, endoplasmic reticulum aminopeptidase 1, tricom interacting factor F2, tricorn interacting factor F3, arginyl aminopeptidase-like 1, ERAP2 aminopeptidase, aminopeptidase, aminopeptidase O, or Tata binding protein associated factor. In some embodiments, the endogenous gene targeted by the heterologous RNA polynucleotide is ANPEP. In some embodiments, the endogenous gene is a member of the minor histocompatibility antigen family such as AKAP13, APOBEC3B, ARHGDIB, BCAT2, BCL2A1, CD19, CENPM, CTSH, C19orf48, DDX3Y, DPH1, EB13, ERAP1, ERBB2, GEMIN4, HEATR1, ARHGAP45, HMHB1, HMSD, KDM5D, PUM3, RESF1, LY75, MR1, MTHFD1, MYO1G, NUP133, PDCD11, PI4K2B, PKN3, PRCP, PTK2B, P2RX5, RPS4Y1, SLC1A5, SLC19A1, SON, SP110, SSR1, SWAP70, TMSB4Y, TOR3A, TRIM22, TRIM42, TRIP10, TYMP, UGT2B17, USP9Y, UTY, WNK1, or ZNF419. In some embodiments, the endogenous gene targeted by the heterologous RNA polynucleotide is MTHFD1. In some embodiments, the endogenous gene is a member of the type II transmembrane serine protease family such as HAT/DESC subfamily: HAT. DESC1, TMPRSS11A, HAT-like 2, HAT-like 3, HAT-like 4, HAT-like 5; Hepsin/TMPRSS subfamily: Hepsin, TMPRSS2, TMPRSS3, TMPRSS4, MSPL, Spinesin, Enteropeptidase; Matriptase subfamily: Matriptase, Matriptase-2, Matripase-3, Polyserease-1; and Corin subfamily Corin. In some embodiments, the endogenous gene targeted by the heterologous RNA polynucleotide is TMPRSS2.

[0240] In some embodiments, the at least one heterologous RNA polynucleotide comprising a nucleic acid sequence of any one of SEQ ID NOs: 13607-13649 or 13701-13729 can target the RdRP, N-protein, or the viral genome of any one strain of the coronavirus described herein. In some embodiments, a combination of the at least one heterologous RNA polynucleotide comprising a nucleic acid sequence of any one of SEQ ID NOs: 13651-13664 or 13671-13684 can target any one strain of the virus described herein. In some embodiments, a combination of the at least one heterologous RNA polynucleotide comprising a nucleic acid sequence of any one of SEQ ID NOs: 13651-13664 or 13671-13684 can target viral genome of at least about 500, 1000, 5000, 10000, 15000, 20000, 21000, 22000, 23000, 24000, 25000, 30000, or more strains of virus. of any one of the strain of the virus described herein. In some embodiments, a combination of the at least one heterologous RNA polynucleotide comprising a nucleic acid sequence of any one of SEQ ID NOs: 13651-13664 or 13671-13684 can target viral genome of at least about 500, 1000, 5000, 10000, 15000, 20000, 21000, 22000, 23000, 24000, 25000, 30000, or more strains of virus. of any one of the strain of the RNA virus described herein. Non-limiting examples of the RNA virus include RNA virus families of Coronaviridae, Pneumoviridae, Paramyxoviridae, Caliciviridae, Hepeviridae, Picomaviridae, Filoviridae, Flaviviridae, Rhabdoviridae, or Togaviridae.

[0241] In some embodiments, the viral genomes, viral genes, or the transcripts of the viral genomes and viral genes targeted, cleaved, or degraded can be deoxyribonucleic acid (DNA). In some cases, the DNA can be single-stranded or doubled-stranded. In some embodiments, the viral genomes, viral genes, or the transcripts of the viral genomes and viral genes targeted, cleaved, or degraded can be ribonucleic acid (RNA). In some instances, the RNA can be mRNA, rRNA, SRP RNA, tRNA, tmRNA, snRNA, snoRNA, gRNA, aRNA, crRNA, lncRNA, miRNA, ncRNA, piRNA, siRNA, or shRNA. In some embodiments, the target RNA is an mRNA.

[0242] In some embodiments, the systems and methods described herein target and bind to at least a portion of the target viral genomes or viral genes. In some embodiments, the systems and methods described herein target and bind to at least a portion of the target viral genomes or viral genes for cleavage or degradation. In some embodiments, the portion of the viral genomes or viral genes being targeted and bound by the systems and methods described herein is between 5 nt to 100 nt. In some embodiments, the portion of the viral genomes or viral genes being targeted and bound by the systems and methods described herein is between 5 nucleotides (nt) to 10 nt, 5 nt to 15 nt, 5 nt to 20 nt, 5 nt to 25 nt, 5 nt to 30 nt, 5 nt to 40 nt, 5 nt to 50 nt, 5 nt to 60 nt, 5 nt to 70 nt, 5 nt to 80 nt, 5 nt to 100 nt, 10 nt to 15 nt, 10 nt to 20 nt, 10 nt to 25 nt, 10 nt to 30 nt, 10 nt to 40 nt, 10 nt to 50 nt, 10 nt to 60 nt, 1.0 nt to 70 nt, 10 nt to 80 nt, 10 nt to 100 nt, 15 nt to 20 nt, 15 nt to 25 nt, 15 nt to 30 nt, 15 nt to 40 nt, 15 nt to 50 nt, 15 nt to 60 nt, 15 nt to 70 nt, 15 nt to 80 nt, 15 nt to 100 nt, 20 nt to 25 nt, 20 nt to 30 nt, 20 nt to 40 nt, 20 nt to 50 nt, 20 nt to 60 nt, 20 nt to 70 nt, 20 nt to 80 nt, 20 nt to 100 nt, 25 nt to 30 nt, 25 nt to 40 nt, 25 nt to 50 nt, 25 nt to 60 nt, 25 nt to 70 nt, 25 nt to 80 nt, 25 nt to 100 nt, 30 nt to 40 nt, 30 nt to 50 nt, 30 nt to 60 nt, 30 nt to 70 nt, 30 nt to 80 nt, 30 nt to 100 nt, 40 nt to 50 nt, 40 nt to 60 nt, 40 nt to 70 nt, 40 nt to 80 nt, 40 nt to 100 nt, 50 nt to 60 nt, 50 nt to 70 nt, 50 nt to 80 nt, 50 nt to 100 nt, 60 nt to 70 nt, 60 nt to 80 nt, 60 nt to 100 nt, 70 nt to 80 nt, 70 nt to 100 nt, or 80 nt to 100 nt. In some embodiments, the portion of the viral genomes or viral genes being targeted and bound by the systems and methods described herein is comprises at least about 5 nt, 10 nt, 15 nt, 20 nt, 25 nt, 30 nt, 40 nt, 50 nt, 60 nt, 70 nt, 80 nt, 100 nt, or more. In some embodiments, the portion of the viral genomes or viral genes being targeted and bound by the systems and methods described herein comprises about 5 nt, 10 nt, 15 nt, 20 nt, 25 nt, 30 nt, 40 nt, 50 nt, 60 nt, 70 nt, or 80 nt. In some embodiments, the portion of the viral genomes or viral genes being targeted and bound by the systems and methods described herein comprises at most about 100 nt, 90 nt, 80 nt, 70 nt, 60 nt, 50 nt, 40 nt, 30 nt, 25 nt, 20 nt, 15 nt, 10 nt, 5 nt, or less.

[0243] In some embodiments, the portion of the viral genomes or viral genes being targeted and bound by the systems and methods described herein is at least 5 nt to 100 nt. In some embodiments, the portion of the viral genomes or viral genes being targeted and bound by the systems and methods described herein is at least 5 nt to 10 nt, 5 nt to 15 nt, 5 nt to 20 nt, 5 nt to 25 nt, 5 nt to 30 nt, 5 nt to 40 nt, 5 nt to 50 nt, 5 nt to 60 nt, 5 nt to 70 nt, 5 nt to 80 nt, 5 nt to 100 nt, 10 nt to 15 nt, 10 nt to 20 nt, 10 nt to 25 nt, 10 nt to 30 nt, 10 nt to 40 nt, 10 nt to 50 nt, 10 nt to 60 nt, 10 nt to 70 nt, 10 nt to 80 nt, 10 nt to 100 nt, 15 nt to 20 nt, 15 nt to 2.5 nt, 15 nt to 30 nt, 15 nt to 40 nt, 15 nt to 50 nt, 15 nt to 60 nt, 15 nt to 70 nt, 15 nt to 80 nt, 15 nt to 100 nt, 20 nt to 25 nt, 20 nt to 30 nt, 20 nt to 40 nt, 20 nt to 50 nt, 20 nt to 60 nt, 20 nt to 70 nt, 20 nt to 80 nt, 20 nt to 100 nt, 25 nt to 30 nt, 25 nt to 40 nt, 25 nt to 50 nt, 25 nt to 60 nt, 25 nt to 70 nt, 25 nt to 80 nt, 25 nt to 100 nt, 30 nt to 40 nt, 30 nt to 50 nt, 30 nt to 60 nt, 30 nt to 70 nt, 30 nt to 80 nt, 30 nt to 100 nt, 40 nt to 50 nt, 40 nt to 60 nt, 40 nt to 70 nt, 40 nt to 80 nt, 40 nt to 100 nt, 50 nt to 60 nt, 50 nt to 70 nt, 50 nt to 80 nt, 50 nt to 100 nt, 60 nt to 70 nt, 60 nt to 80 nt, 60 nt to 100 nt, 70 nt to 80 nt, 70 nt to 100 nt, or 80 nt to 100 nt. In some embodiments, the portion of the viral genomes or viral genes being targeted and bound by the systems and methods described herein is at most 5 nt to 100 nt. In some embodiments, the portion of the viral genomes or viral genes being targeted and bound by the systems and methods described herein is at most 5 nt to 10 nt, 5 nt to 15 nt, 5 nt to 20 nt, 5 nt to 25 nt, 5 nt to 30 nt, 5 nt to 40 nt, 5 nt to 50 nt, 5 nt to 60 nt, 5 nt to 70 nt, 5 nt to 80 nt, 5 nt to 100 nt, 10 nt to 15 nt, 10 nt to 20 nt, 10 nt to 25 nt, 10 nt to 30 nt, 10 nt to 40 nt, 10 nt to 50 nt, 10 nt to 60 nt, 10 nt to 70 nt, 10 nt to 80 nt, 10 nt to 100 nt, 15 nt to 20 nt, 15 nt to 25 nt, 15 nt to 30 nt, 15 nt to 40 nt, 15 nt to 50 nt, 15 nt to 60 nt, 15 nt to 70 nt, 15 nt to 80 nt, 15 nt to 100 nt, 20 nt to 25 nt, 20 nt to 30 nt, 20 nt to 40 nt, 20 nt to 50 nt, 20 nt to 60 nt, 20 nt to 70 nt, 20 nt to 80 nt, 20 nt to 100 nt, 25 nt to 30 nt, 25 nt to 40 nt, 25 nt to 50 nt, 25 nt to 60 nt, 25 nt to 70 nt, 25 nt to 80 nt, 25 nt to 100 nt, 30 nt to 40 nt, 30 nt to 50 nt, 30 nt to 60 nt, 30 nt to 70 nt, 30 nt to 80 nt, 30 nt to 100 nt, 40 nt to 50 nt, 40 nt to 60 nt, 40 nt to 70 nt, 40 nt to 80 nt, 40 nt to 100 m, 50 nt to 60 nt, 50 nt to 70 nt, 50 nt to 80 nt, 50 nt to 100 nt, 60 nt to 70 nt, 60 nt to 80 nt, 60 nt to 100 nt, 70 nt to 80 nt, 70 nt to 100 nt, or 80 nt to 100 nt.

[0244] B. Gene Regulating Moiety

[0245] In some instances, the systems and methods described herein comprise a gene regulating moiety to regulate the expressions of viral genomes or viral genes. In some embodiments, the gene regulating moiety comprises a CRISPR-Cas polypeptide. In some embodiments, the gene regulating moiety can be, for example, Class 1 CRISPR-associated (Cas) polypeptides, Class 2 Cas polypeptides, type I Cas polypeptides, type II Cas polypeptides, type III Cas polypeptides, type IV Cas polypeptides, type V Cas polypeptides, and type VI, CRISPR-associated RNA binding proteins, or a functional fragment thereof. Cas polypeptides suitable for use with the present disclosure can include Cas9, Cas12, Cas13, Cpf1 (or Cas12a), C2C1, C2C2 (or Cas13a), Cas13b, Cas13c, Cas13d, C2C3, Casl, CaslB, Cas2, Cas3, Cas4, Cas5, Cas5e (CasD), Cas6, Cas6e, Cas6f, Cas7, Cas8a, Cas8a1, Cas8a2, Cas8b, Cas8c, Csnl, Csxl2, Cas10, Cas10d, CaslO, CaslOd, CasF, CasG, CasH, Csy1, Csy2, Csy3, Csel (CasA), Cse2 (CasB), Cse3 (CasE), Cse4 (CasC), Csc1, Csc2, Csa5, Csn2, Csm2, Csm3, Csm4, Csm5, Csm6, Cmr1, Cmr3, Cmr4, Cmr5, Cmr6, Csb1, Csb2, Csb3, Csxl7, Csxl4, CsxlO, Csxl6, CsaX, Csx3, Csxl, Csxl5, Csfl, Csf2, Csf3, Csf4, or Cul966; any derivative thereof; any variant thereof; or any fragment thereof. In some embodiments, Cas13 can include, but are not limited to, Cas13a, Cas13b, Cas13c, and Cas 13d (e.g., CasRx). CRISPR/Cas can be DNA and/or RNA cleaving, or can exhibit reduced cleavage activity. Gene regulating moiety can be configured to complex with at least one heterologous RNA polynucleotide. In some cases, the gene regulating moiety can be fused with a transcription activator or transcription repressor.

[0246] Any suitable nuclease (e.g., endonuclease) can be used in as the gene regulating moiety. Suitable nucleases include, but are not limited to, CRISPR-associated (Cas) proteins or Cas nucleases including type I CRISPR-associated (Cas) polypeptides, type II CRISPR-associated (Cas) polypeptides, type III CRISPR-associated (Cas) polypeptides, type IV CRISPR-associated (Cas) polypeptides, type V CRISPR-associated (Cas) polypeptides, and type VI CRISPR-associated (Cas) polypeptides; zinc finger nucleases (ZFN); transcription activator-like effector nucleases (TALEN); meganucleases: RNA-binding proteins (RBP); CRISPR-associated RNA binding proteins; recombinases; flippases; transposases; Argonaute (Ago) proteins (e.g., prokarvotic Argonaute (pAgo), archaeal Argonaute (aAgo), eukaryotic Argonaute (eAgo), and Natronobacterium gregoryi Argonaute (NgAgo)); Adenosine deaminases acting on RNA (ADAR); CIRT, PUF, homing endonuclease, or any functional fragment thereof, any derivative thereof; any variant thereof; and any fragment thereof.

[0247] A gene regulating moiety as disclosed herein can be coupled (e.g., linked or fused) to additional peptide sequences which are not involved in regulating gene expression, for example linker sequences, targeting sequences, etc. The term “targeting sequence,” as used herein, refers to a nucleotide sequence and the corresponding amino acid sequence which encodes a targeting polypeptide which mediates the localization (or retention) of a protein to a sub-cellular location, e.g., plasma membrane or membrane of a given organelle, nucleus, cytosol, mitochondria, endoplasmic reticulum (ER), Golgi, chloroplast, apoplast, peroxisome or other organelle. For example, a targeting sequence can direct a protein (e.g., a receptor polypeptide or an adaptor polypeptide) to a nucleus utilizing a nuclear localization signal (NLS); outside of a nucleus of a cell, for example to the cytoplasm, utilizing a nuclear export signal (NES); mitochondria utilizing a mitochondrial targeting signal; the endoplasmic reticulum (ER) utilizing an ER-retention signal; a peroxisome utilizing a peroxisomal targeting signal; plasma membrane utilizing a membrane localization signal; or combinations thereof.

[0248] A gene regulating moiety as disclosed herein can be a part of a fusion construct (e.g., a fusion protein). As used herein, “fusion” can refer to a protein and/or nucleic acid comprising one or more non-native sequences (e.g., moieties). A fusion can comprise one or more of the same non-native sequences. A fusion can comprise one or more of different non-native sequences. A fusion can be a chimera. A fusion can comprise a nucleic acid affinity tag. A fusion can comprise a barcode. A fusion can comprise a peptide affinity tag. A fusion can provide for subcellular localization of the site-directed polypeptide (e.g., a nuclear localization signal (NLS) for targeting to the nucleus, a mitochondrial localization signal for targeting to the mitochondria, a chloroplast localization signal for targeting to a chloroplast, an endoplasmic reticulum (ER) retention signal, and the like). A fusion can provide a non-native sequence (e.g., affinity tag) that can be used to track or purify. A fusion can be a small molecule such as biotin or a dye such as Alexa fluor dyes, Cyanine3 dye, Cyanine5 dye.

[0249] A fusion can refer to any protein with a functional effect. For example, a fusion protein can comprise methyltransferase activity, demethylase activity, dismutase activity, alkylation activity, depurination activity, oxidation activity, pyrimidine dimer forming activity, integrase activity, transposase activity, recombinase activity, polymerase activity (e.g., a reverse transcriptase activity), ligase activity, helicase activity, photolyase activity or glycosylase activity, acetyltransferase activity, deacetylase activity, kinase activity, phosphatase activity, ubiquitin ligase activity, deubiquitinating activity, adenylation activity, deadenylation activity, SUMOylating activity, deSUMOylating activity, ribosylation activity, deribosylation activity, myristoylation activity, remodelling activity, protease activity, oxidoreductase activity, transferase activity, hydrolase activity, lyase activity, isomerase activity, synthase activity, synthetase activity, or demyristoylation activity. An effector protein can modify a genomic locus. A fusion protein can be a fusion in a Cas protein. A fusion protein can be a non-native sequence in a Cas protein.

[0250] In some embodiments, the gene regulating moiety can be fused to one or more transcription repressor domains, activator domains, epigenetic domains, recombinase domains, transposase domains, flippase domains, nickase domains, or any combination thereof. The activator domain can include one or more tandem activation domains located at the carboxyl terminus of the protein. In some cases, the gene regulating moiety includes one or more tandem repressor domains located at the carboxyl terminus of the protein. Non-limiting exemplary activation domains include GAL4, herpes simplex activation domain VP16, VP64 (a tetramer of the herpes simplex activation domain VP16), NF-κB p65 subunit. Epstein-Barr virus R transactivator (Rta) and are described in Chavez et al., Nat Methods, 2015, 12(4):326-328 and U.S. Patent App. Publ. No. 20140068797. Non-limiting exemplary repression domains include the KRAB (Kruppel-associated box) domain of Kox1, the Mad mSIN3 interaction domain (SID), ERF repressor domain (ERD), and are described in Chavez et al., Nat Methods, 2015, 12(4):326-328 and U.S. Patent App. Publ. No. 20140068797. In some embodiments, the gene regulating moiety includes one or more tandem repressor domains located at the amino terminus of the protein.

[0251] In some embodiments, the nuclease disclosed herein can be a protein that lacks nucleic acid cleavage activity. In some cases, a Cas protein is a dead Cas protein. A dead Cas protein can be a protein that lacks nucleic acid cleavage activity. A Cas protein can comprise a modified form of a wild type Cas protein. The modified form of the wild type Cas protein can comprise an amino acid change (e.g., deletion, insertion, or substitution) that reduces the nucleic acid-cleaving activity of the Cas protein. For example, the modified form of the Cas protein can have less than 90%, less than 80%, less than 70%, less than 60%, less than 50%, less than 40%, less than 30%, less than 20%, less than 10%, less than 5%, or less than 1% of the nucleic acid-cleaving activity of the wild-type Cas protein (e.g., Cas9 from S. pyogenes). The modified form of Cas protein can have no substantial nucleic acid-cleaving activity. When a Cas protein is a modified form that has no substantial nucleic acid-cleaving activity, it can be referred to as enzymatically inactive and/or “dead” (abbreviated by “d”). A dead Cas protein (e.g., dCas, dCas9) can bind to a target polynucleotide but may not cleave the target polynucleotide. In some aspects, a dead Cas protein is a dead Cas9 protein.

[0252] In some embodiments, a dCas (e.g., dCas9) polypeptide can associate with a single guide RNA (sgRNA) to activate or repress transcription of target DNA. sgRNAs can be introduced into cells expressing the engineered chimeric receptor polypeptide. In some cases, such cells contain one or more different sgRNAs that target the same nucleic acid. In other cases, the sgRNAs target different nucleic acids in the cell.

[0253] In some embodiments, the gene regulating moiety can comprise a catalytically inactive Cas polypeptide, where the nuclease activity of the Cas polypeptide is eliminated or substantially eliminated.

[0254] In some instances, the gene regulating moiety can comprise a catalytically inactivated Cas9 (dCas9), any derivative thereof; any variant thereof: or any fragment thereof.

[0255] In some instances, the gene regulating moiety can comprise a catalytically inactivated Cas12 (dCas12), any derivative thereof; any variant thereof: or any fragment thereof.

[0256] In some instances, the gene regulating moiety can comprise a catalytically inactivated Cas13 (dCas13); any derivative thereof; any variant thereof; or any fragment thereof.

[0257] In some embodiments, the gene regulating moiety can be complexed with the at least one heterologous nucleic acid polynucleotide as described herein. In some embodiments, the at least one heterologous nucleic acid polynucleotide can be either heterologous DNA polynucleotide or heterologous RNA polynucleotide. In some embodiments, the gene regulating moiety can be complexed with at least one heterologous RNA polynucleotide. In some cases, the complexing with the at least one heterologous RNA polynucleotide direct and target the gene regulating moiety to the portion of the viral genomes, viral genes, or transcripts of the viral genomes or viral genes targeted. In some cases, the complexing with the at least one heterologous RNA polynucleotide direct and target the gene regulating moiety to the portion of the viral genomes, viral genes, or transcripts of the viral genomes or viral genes targeted for cleavage or degradation. In some cases, the complexing with the at least one heterologous RNA polynucleotide direct and target the gene regulating moiety to the portion of the viral genomes, viral genes, or transcripts of the viral genomes or viral genes, where the gene regulating moiety reduces the expression of the viral genomes or viral genes in a cell.

[0258] In some embodiments, the gene regulating moiety can reduce the expression of the viral genomes or viral genes between about 0.1 fold to about 10,000 fold. In some embodiments, the gene regulating moiety can reduce the expression of the viral genomes or viral genes between about 0.1 fold to about 0.2 fold, about 0.1 fold to about 0.5 fold, about 0.1 fold to about 1 fold, about 0.1 fold to about 2 fold, about 0.1 fold to about 5 fold, about 0.1 fold to about 10 fold, about 0.1 fold to about 20 fold, about 0.1 fold to about 50 fold, about 0.1 fold to about 100 fold, about 0.1 fold to about 1,000 fold, about 0.1 fold to about 10,000 fold, about 0.2 fold to about 0.5 fold, about 0.2 fold to about 1 fold, about 0.2 fold to about 2 fold, about 0.2 fold to about 5 fold, about 0.2 fold to about 10 fold, about 0.2 fold to about 20 fold, about 0.2 fold to about 50 fold, about 0.2 fold to about 100 fold, about 0.2 fold to about 1,000 fold, about 0.2 fold to about 10,000 fold, about 0.5 fold to about 1 fold, about 0.5 fold to about 2 fold, about 0.5 fold to about 5 fold, about 0.5 fold to about 10 fold, about 0.5 fold to about 20 fold, about 0.5 fold to about 50 fold, about 0.5 fold to about 100 fold, about 0.5 fold to about 1,000 fold, about 0.5 fold to about 10,000 fold, about 1 fold to about 2 fold, about 1 fold to about 5 fold, about 1 fold to about 10 fold, about 1 fold to about 20 fold, about 1 fold to about 50 fold, about 1 fold to about 100 fold, about 1 fold to about 1,000 fold, about 1 fold to about 10,000 fold, about 2 fold to about 5 fold, about 2 fold to about 10 fold, about 2 fold to about 20 fold, about 2 fold to about 50 fold, about 2 fold to about 100 fold, about 2 fold to about 1,000 fold, about 2 fold to about 10,000 fold, about 5 fold to about 10 fold, about 5 fold to about 20 fold, about 5 fold to about 50 fold, about 5 fold to about 100 fold, about 5 fold to about 1,000 fold, about 5 fold to about 10,000 fold, about 10 fold to about 20 fold, about 10 fold to about 50 fold, about 10 fold to about 100 fold, about 10 fold to about 1,000 fold, about 10 fold to about 10,000 fold, about 20 fold to about 50 fold, about 20 fold to about 100 fold, about 20 fold to about 1,000 fold, about 20 fold to about 10,000 fold, about 50 fold to about 100 fold, about 50 fold to about 1,000 fold, about 50 fold to about 10,000 fold, about 100 fold to about 1,000 fold, about 100 fold to about 10,000 fold, or about 1,000 fold to about 10,000 fold. In some embodiments, the gene regulating moiety can reduce the expression of the viral genomes or viral genes between about 0.1 fold, about 0.2 fold, about 0.5 fold, about 1 fold, about 2 fold, about 5 fold, about 10 fold, about 20 fold, about 50 fold, about 100 fold, about 1,000 fold, or about 10,000 fold. In some embodiments, the gene regulating moiety can reduce the expression of the viral genomes or viral genes between at least about 0.1 fold, about 0.2 fold, about 0.5 fold, about 1 fold, about 2 fold, about 5 fold, about 10 fold, about 20 fold, about 50 fold, about 100 fold, or about 1,000 fold. In some embodiments, the gene regulating moiety can reduce the expression of the viral genomes or viral genes between at most about 0.2 fold, about 0.5 fold, about 1 fold, about 2 fold, about 5 fold, about 10 fold, about 20 fold, about 50 fold, about 100 fold, about 1,000 fold, or about 10,000 fold.

[0259] In some embodiments, the gene regulating moiety can reduce the expression of the viral genomes or viral genes by at least about 0.1 fold to about 10,000 fold. In some embodiments, the gene regulating moiety can reduce the expression of the viral genomes or viral genes by at least about 0.1 fold to about 0.2 fold, about 0.1 fold to about 0.5 fold, about 0.1 fold to about 1 fold, about 0.1 fold to about 2 fold, about 0.1 fold to about 5 fold, about 0.1 fold to about 10 fold, about 0.1 fold to about 20 fold, about 0.1 fold to about 50 fold, about 0.1 fold to about 100 fold, about 0.1 fold to about 1,000 fold, about 0.1 fold to about 10,000 fold, about 0.2 fold to about 0.5 fold, about 0.2 fold to about 1 fold, about 0.2 fold to about 2 fold, about 0.2 fold to about 5 fold, about 0.2 fold to about 10 fold, about 0.2 fold to about 20 fold, about 0.2 fold to about 50 fold, about 0.2 fold to about 100 fold, about 0.2 fold to about 1,000 fold, about 0.2 fold to about 10,000 fold, about 0.5 fold to about 1 fold, about 0.5 fold to about 2 fold, about 0.5 fold to about 5 fold, about 0.5 fold to about 10 fold, about 0.5 fold to about 20 fold, about 0.5 fold to about 50 fold, about 0.5 fold to about 100 fold, about 0.5 fold to about 1,000 fold, about 0.5 fold to about 10,000 fold, about 1 fold to about 2 fold, about 1 fold to about 5 fold, about 1 fold to about 10 fold, about 1 fold to about 20 fold, about 1 fold to about 50 fold, about 1 fold to about 100 fold, about 1 fold to about 1,000 fold, about 1 fold to about 10,000 fold, about 2 fold to about 5 fold, about 2 fold to about 10 fold, about 2 fold to about 20 fold, about 2 fold to about 50 fold, about 2 fold to about 100 fold, about 2 fold to about 1,000 fold, about 2 fold to about 10,000 fold, about 5 fold to about 10 fold, about 5 fold to about 20 fold, about 5 fold to about 50 fold, about 5 fold to about 100 fold, about 5 fold to about 1,000 fold, about 5 fold to about 10,000 fold, about 10 fold to about 20 fold, about 10 fold to about 50 fold, about 10 fold to about 100 fold, about 10 fold to about 1,000 fold, about 10 fold to about 10,000 fold, about 20 fold to about 50 fold, about 20 fold to about 100 fold, about 20 fold to about 1,000 fold, about 20 fold to about 10,000 fold, about 50 fold to about 100 fold, about 50 fold to about 1,000 fold, about 50 fold to about 10,000 fold, about 100 fold to about 1,000 fold, about 100 fold to about 10,000 fold, or about 1,000 fold to about 10,000 fold. In some embodiments, the gene regulating moiety can reduce the expression of the viral genomes or viral genes by at least about 0.1 fold, about 0.2 fold, about 0.5 fold, about 1 fold, about 2 fold, about 5 fold, about 10 fold, about 20 fold, about 50 fold, about 100 fold, about 1,000 fold, or about 10,000 fold. In some embodiments, the gene regulating moiety can reduce the expression of the viral genomes or viral genes by at least at least about 0.1 fold, about 0.2 fold, about 0.5 fold, about 1 fold, about 2 fold, about 5 fold, about 10 fold, about 20 fold, about 50 fold, about 100 fold, or about 1,000 fold. In some embodiments, the gene regulating moiety can reduce the expression of the viral genomes or viral genes by at least at most about 0.2 fold, about 0.5 fold, about 1 fold, about 2 fold, about 5 fold, about 10 fold, about 20 fold, about 50 fold, about 100 fold, about 1,000 fold, or about 10,000 fold.

[0260] In some embodiments, the gene regulating moiety can reduce the expression of the viral genomes or viral genes by at most about 0.1 fold to about 10,000 fold. In some embodiments, the gene regulating moiety can reduce the expression of the viral genomes or viral genes by at most about 0.1 fold to about 0.2 fold, about 0.1 fold to about 0.5 fold, about 0.1 fold to about 1 fold, about 0.1 fold to about 2 fold, about 0.1 fold to about 5 fold, about 0.1 fold to about 10 fold, about 0.1 fold to about 20 fold, about 0.1 fold to about 50 fold, about 0.1 fold to about 100 fold, about 0.1 fold to about 1,000 fold, about 0.1 fold to about 10,000 fold, about 0.2 fold to about 0.5 fold, about 0.2 fold to about 1 fold, about 0.2 fold to about 2 fold, about 0.2 fold to about 5 fold, about 0.2 fold to about 10 fold, about 0.2 fold to about 20 fold, about 0.2 fold to about 50 fold, about 0.2 fold to about 100 fold, about 0.2 fold to about 1,000 fold, about 0.2 fold to about 10,000 fold, about 0.5 fold to about 1 fold, about 0.5 fold to about 2 fold, about 0.5 fold to about 5 fold, about 0.5 fold to about 10 fold, about 0.5 fold to about 20 fold, about 0.5 fold to about 50 fold, about 0.5 fold to about 100 fold, about 0.5 fold to about 1,000 fold, about 0.5 fold to about 10,000 fold, about 1 fold to about 2 fold, about 1 fold to about 5 fold, about 1 fold to about 10 fold, about 1 fold to about 20 fold, about 1 fold to about 50 fold, about 1 fold to about 100 fold, about 1 fold to about 1,000 fold, about 1 fold to about 10,000 fold, about 2 fold to about 5 fold, about 2 fold to about 10 fold, about 2 fold to about 20 fold, about 2 fold to about 50 fold, about 2 fold to about 100 fold, about 2 fold to about 1,000 fold, about 2 fold to about 10,000 fold, about 5 fold to about 10 fold, about 5 fold to about 20 fold, about 5 fold to about 50 fold, about 5 fold to about 100 fold, about 5 fold to about 1,000 fold, about 5 fold to about 10,000 fold, about 10 fold to about 20 fold, about 10 fold to about 50 fold, about 10 fold to about 100 fold, about 10 fold to about 1,000 fold, about 10 fold to about 10,000 fold, about 20 fold to about 50 fold, about 20 fold to about 100 fold, about 20 fold to about 1,000 fold, about 20 fold to about 10,000 fold, about 50 fold to about 100 fold, about 50 fold to about 1,000 fold, about 50 fold to about 10,000 fold, about 100 fold to about 1,000 fold, about 100 fold to about 10,000 fold, or about 1,000 fold to about 10,000 fold. In some embodiments, the gene regulating moiety can reduce the expression of the viral genomes or viral genes by at most about 0.1 fold, about 0.2 fold, about 0.5 fold, about 1 fold, about 2 fold, about 5 fold, about 10 fold, about 20 fold, about 50 fold, about 100 fold, about 1,000 fold, or about 10,000 fold. In some embodiments, the gene regulating moiety can reduce the expression of the viral genomes or viral genes by at most at least about 0.1 fold, about 0.2 fold, about 0.5 fold, about 1 fold, about 2 fold, about 5 fold, about 10 fold, about 20 fold, about 50 fold, about 100 fold, or about 1,000 fold. In some embodiments, the gene regulating moiety can reduce the expression of the viral genomes or viral genes by at most at most about 0.2 fold, about 0.5 fold, about 1 fold, about 2 fold, about 5 fold, about 10 fold, about 20 fold, about 50 fold, about 100 fold, about 1,000 fold, or about 10,000 fold.

[0261] In some embodiments, the gene regulating moiety can reduce the expression of viral RdRP between about 0.1 fold to about 10,000 fold. In some embodiments, the gene regulating moiety can reduce the expression of viral RdRP between about 0.1 fold to about 0.2 fold, about 0.1 fold to about 0.5 fold, about 0.1 fold to about 1 fold, about 0.1 fold to about 2 fold, about 0.1 fold to about 5 fold, about 0.1 fold to about 10 fold, about 0.1 fold to about 20 fold, about 0.1 fold to about 50 fold, about 0.1 fold to about 100 fold, about 0.1 fold to about 1,000 fold, about 0.1 fold to about 10,000 fold, about 0.2 fold to about 0.5 fold, about 0.2 fold to about 1 fold, about 0.2 fold to about 2 fold, about 0.2 fold to about 5 fold, about 0.2 fold to about 10 fold, about 0.2 fold to about 20 fold, about 0.2 fold to about 50 fold, about 0.2 fold to about 100 fold, about 0.2 fold to about 1,000 fold, about 0.2 fold to about 10,000 fold, about 0.5 fold to about 1 fold, about 0.5 fold to about 2 fold, about 0.5 fold to about 5 fold, about 0.5 fold to about 10 fold, about 0.5 fold to about 20 fold, about 0.5 fold to about 50 fold, about 0.5 fold to about 100 fold, about 0.5 fold to about 1,000 fold, about 0.5 fold to about 10,000 fold, about 1 fold to about 2 fold, about 1 fold to about 5 fold, about 1 fold to about 10 fold, about 1 fold to about 20 fold, about 1 fold to about 50 fold, about 1 fold to about 100 fold, about 1 fold to about 1,000 fold, about 1 fold to about 10,000 fold, about 2 fold to about 5 fold, about 2 fold to about 10 fold, about 2 fold to about 20 fold, about 2 fold to about 50 fold, about 2 fold to about 100 fold, about 2 fold to about 1,000 fold, about 2 fold to about 10,000 fold, about 5 fold to about 10 fold, about 5 fold to about 20 fold, about 5 fold to about 50 fold, about 5 fold to about 100 fold, about 5 fold to about 1,000 fold, about 5 fold to about 10,000 fold, about 10 fold to about 20 fold, about 10 fold to about 50 fold, about 10 fold to about 100 fold, about 10 fold to about 1,000 fold, about 10 fold to about 10,000 fold, about 20 fold to about 50 fold, about 20 fold to about 100 fold, about 20 fold to about 1,000 fold, about 20 fold to about 10,000 fold, about 50 fold to about 100 fold, about 50 fold to about 1,000 fold, about 50 fold to about 10,000 fold, about 100 fold to about 1,000 fold, about 100 fold to about 10,000 fold, or about 1,000 fold to about 10,000 fold. In some embodiments, the gene regulating moiety can reduce the expression of viral RdRP between about 0.1 fold, about 0.2 fold, about 0.5 fold, about 1 fold, about 2 fold, about 5 fold, about 10 fold, about 20 fold, about 50 fold, about 100 fold, about 1,000 fold, or about 10,000 fold. In some embodiments, the gene regulating moiety can reduce the expression of viral RdRP between at least about 0.1 fold, about 0.2 fold, about 0.5 fold, about 1 fold, about 2 fold, about 5 fold, about 10 fold, about 20 fold, about 50 fold, about 100 fold, or about 1,000 fold. In some embodiments, the gene regulating moiety can reduce the expression of viral RdRP between at most about 0.2 fold, about 0.5 fold, about 1 fold, about 2 fold, about 5 fold, about 10 fold, about 20 fold, about 50 fold, about 100 fold, about 1,000 fold, or about 10,000 fold.

[0262] In some embodiments, the gene regulating moiety can reduce the expression of viral RdRP by at least about 0.1 fold to about 10,000 fold. In some embodiments, the gene regulating moiety can reduce the expression of viral RdRP by at least about 0.1 fold to about 0.2 fold, about 0.1 fold to about 0.5 fold, about 0.1 fold to about 1 fold, about 0.1 fold to about 2 fold, about 0.1 fold to about 5 fold, about 0.1 fold to about 10 fold, about 0.1 fold to about 20 fold, about 0.1 fold to about 50 fold, about 0.1 fold to about 100 fold, about 0.1 fold to about 1,000 fold, about 0.1 fold to about 10,000 fold, about 0.2 fold to about 0.5 fold, about 0.2 fold to about 1 fold, about 0.2 fold to about 2 fold, about 0.2 fold to about 5 fold, about 0.2 fold to about 10 fold, about 0.2 fold to about 20 fold, about 0.2 fold to about 50 fold, about 0.2 fold to about 100 fold, about 0.2 fold to about 1,000 fold, about 0.2 fold to about 10,000 fold, about 0.5 fold to about 1 fold, about 0.5 fold to about 2 fold, about 0.5 fold to about 5 fold, about 0.5 fold to about 10 fold, about 0.5 fold to about 20 fold, about 0.5 fold to about 50 fold, about 0.5 fold to about 100 fold, about 0.5 fold to about 1,000 fold, about 0.5 fold to about 10,000 fold, about 1 fold to about 2 fold, about 1 fold to about 5 fold, about 1 fold to about 10 fold, about 1 fold to about 20 fold, about 1 fold to about 50 fold, about 1 fold to about 100 fold, about 1 fold to about 1,000 fold, about 1 fold to about 10,000 fold, about 2 fold to about 5 fold, about 2 fold to about 10 fold, about 2 fold to about 20 fold, about 2 fold to about 50 fold, about 2 fold to about 100 fold, about 2 fold to about 1,000 fold, about 2 fold to about 10,000 fold, about 5 fold to about 10 fold, about 5 fold to about 20 fold, about 5 fold to about 50 fold, about 5 fold to about 100 fold, about 5 fold to about 1,000 fold, about 5 fold to about 10,000 fold, about 10 fold to about 20 fold, about 10 fold to about 50 fold, about 10 fold to about 100 fold, about 10 fold to about 1,000 fold, about 10 fold to about 10,000 fold, about 20 fold to about 50 fold, about 20 fold to about 100 fold, about 20 fold to about 1,000 fold, about 20 fold to about 10,000 fold, about 50 fold to about 100 fold, about 50 fold to about 1,000 fold, about 50 fold to about 10,000 fold, about 100 fold to about 1,000 fold, about 100 fold to about 10,000 fold, or about 1,000 fold to about 10,000 fold. In some embodiments, the gene regulating moiety can reduce the expression of viral RdRP by at least about 0.1 fold, about 0.2 fold, about 0.5 fold, about 1 fold, about 2 fold, about 5 fold, about 10 fold, about 20 fold, about 50 fold, about 100 fold, about 1,000 fold, or about 10,000 fold. In some embodiments, the gene regulating moiety can reduce the expression of viral RdRP by at least at least about 0.1 fold, about 0.2 fold, about 0.5 fold, about 1 fold, about 2 fold, about 5 fold, about 10 fold, about 20 fold, about 50 fold, about 100 fold, or about 1,000 fold. In some embodiments, the gene regulating moiety can reduce the expression of viral RdRP by at least at most about 0.2 fold, about 0.5 fold, about 1 fold, about 2 fold, about 5 fold, about 10 fold, about 20 fold, about 50 fold, about 100 fold, about 1,000 fold, or about 10,000 fold.

[0263] In some embodiments, the gene regulating moiety can reduce the expression of viral RdRP by at most about 0.1 fold to about 10,000 fold. In some embodiments, the gene regulating moiety can reduce the expression of viral RdRP by at most about 0.1 fold to about 0.2 fold, about 0.1 fold to about 0.5 fold, about 0.1 fold to about 1 fold, about 0.1 fold to about 2 fold, about 0.1 fold to about 5 fold, about 0.1 fold to about 10 fold, about 0.1 fold to about 20 fold, about 0.1 fold to about 50 fold, about 0.1 fold to about 100 fold, about 0.1 fold to about 1,000 fold, about 0.1 fold to about 10,000 fold, about 0.2 fold to about 0.5 fold, about 0.2 fold to about 1 fold, about 0.2 fold to about 2 fold, about 0.2 fold to about 5 fold, about 0.2 fold to about 10 fold, about 0.2 fold to about 20 fold, about 0.2 fold to about 50 fold, about 0.2 fold to about 100 fold, about 0.2 fold to about 1,000 fold, about 0.2 fold to about 10,000 fold, about 0.5 fold to about 1 fold, about 0.5 fold to about 2 fold, about 0.5 fold to about 5 fold, about 0.5 fold to about 10 fold, about 0.5 fold to about 20 fold, about 0.5 fold to about 50 fold, about 0.5 fold to about 100 fold, about 0.5 fold to about 1,000 fold, about 0.5 fold to about 10,000 fold, about 1 fold to about 2 fold, about 1 fold to about 5 fold, about 1 fold to about 10 fold, about 1 fold to about 20 fold, about 1 fold to about 50 fold, about 1 fold to about 100 fold, about 1 fold to about 1,000 fold, about 1 fold to about 10,000 fold, about 2 fold to about 5 fold, about 2 fold to about 10 fold, about 2 fold to about 20 fold, about 2 fold to about 50 fold, about 2 fold to about 100 fold, about 2 fold to about 1,000 fold, about 2 fold to about 10,000 fold, about 5 fold to about 10 fold, about 5 fold to about 20 fold, about 5 fold to about 50 fold, about 5 fold to about 100 fold, about 5 fold to about 1,000 fold, about 5 fold to about 10,000 fold, about 10 fold to about 20 fold, about 10 fold to about 50 fold, about 10 fold to about 100 fold, about 10 fold to about 1,000 fold, about 10 fold to about 10,000 fold, about 20 fold to about 50 fold, about 20 fold to about 100 fold, about 20 fold to about 1,000 fold, about 20 fold to about 10,000 fold, about 50 fold to about 100 fold, about 50 fold to about 1,000 fold, about 50 fold to about 10,000 fold, about 100 fold to about 1,000 fold, about 100 fold to about 10,000 fold, or about 1,000 fold to about 10,000 fold. In some embodiments, the gene regulating moiety can reduce the expression of viral RdRP by at most about 0.1 fold, about 0.2 fold, about 0.5 fold, about 1 fold, about 2 fold, about 5 fold, about 10 fold, about 20 fold, about 50 fold, about 100 fold, about 1,000 fold, or about 10,000 fold. In some embodiments, the gene regulating moiety can reduce the expression of viral RdRP by at most at least about 0.1 fold, about 0.2 fold, about 0.5 fold, about 1 fold, about 2 fold, about 5 fold, about 10 fold, about 20 fold, about 50 fold, about 100 fold, or about 1,000 fold. In some embodiments, the gene regulating moiety can reduce the expression of viral RdRP by at most at most about 0.2 fold, about 0.5 fold, about 1 fold, about 2 fold, about 5 fold, about 10 fold, about 20 fold, about 50 fold, about 100 fold, about 1,000 fold, or about 10,000 fold.

[0264] In some embodiments, the gene regulating moiety can reduce the expression of viral N protein between about 0.1 fold to about 10,000 fold. In some embodiments, the gene regulating moiety can reduce the expression of viral N protein between about 0.1 fold to about 0.2 fold, about 0.1 fold to about 0.5 fold, about 0.1 fold to about 1 fold, about 0.1 fold to about 2 fold, about 0.1 fold to about 5 fold, about 0.1 fold to about 10 fold, about 0.1 fold to about 20 fold, about 0.1 fold to about 50 fold, about 0.1 fold to about 100 fold, about 0.1 fold to about 1,000 fold, about 0.1 fold to about 10,000 fold, about 0.2 fold to about 0.5 fold, about 0.2 fold to about 1 fold, about 0.2 fold to about 2 fold, about 0.2 fold to about 5 fold, about 0.2 fold to about 10 fold, about 0.2 fold to about 20 fold, about 0.2 fold to about 50 fold, about 0.2 fold to about 100 fold, about 0.2 fold to about 1,000 fold, about 0.2 fold to about 10,000 fold, about 0.5 fold to about 1 fold, about 0.5 fold to about 2 fold, about 0.5 fold to about 5 fold, about 0.5 fold to about 10 fold, about 0.5 fold to about 20 fold, about 0.5 fold to about 50 fold, about 0.5 fold to about 100 fold, about 0.5 fold to about 1,000 fold, about 0.5 fold to about 10,000 fold, about 1 fold to about 2 fold, about 1 fold to about 5 fold, about 1 fold to about 10 fold, about 1 fold to about 20 fold, about 1 fold to about 50 fold, about 1 fold to about 100 fold, about 1 fold to about 1,000 fold, about 1 fold to about 10,000 fold, about 2 fold to about 5 fold, about 2 fold to about 10 fold, about 2 fold to about 20 fold, about 2 fold to about 50 fold, about 2 fold to about 100 fold, about 2 fold to about 1,000 fold, about 2 fold to about 10,000 fold, about 5 fold to about 10 fold, about 5 fold to about 20 fold, about 5 fold to about 50 fold, about 5 fold to about 100 fold, about 5 fold to about 1,000 fold, about 5 fold to about 10,000 fold, about 10 fold to about 20 fold, about 10 fold to about 50 fold, about 10 fold to about 100 fold, about 10 fold to about 1,000 fold, about 10 fold to about 10,000 fold, about 20 fold to about 50 fold, about 20 fold to about 100 fold, about 20 fold to about 1,000 fold, about 20 fold to about 10,000 fold, about 50 fold to about 100 fold, about 50 fold to about 1,000 fold, about 50 fold to about 10,000 fold, about 100 fold to about 1,000 fold, about 100 fold to about 10,000 fold, or about 1,000 fold to about 10,000 fold. In some embodiments, the gene regulating moiety can reduce the expression of viral N protein between about 0.1 fold, about 0.2 fold, about 0.5 fold, about 1 fold, about 2 fold, about 5 fold, about 10 fold, about 20 fold, about 50 fold, about 100 fold, about 1,000 fold, or about 10,000 fold. In some embodiments, the gene regulating moiety can reduce the expression of viral N protein between at least about 0.1 fold, about 0.2 fold, about 0.5 fold, about 1 fold, about 2 fold, about 5 fold, about 10 fold, about 20 fold, about 50 fold, about 100 fold, or about 1,000 fold. In some embodiments, the gene regulating moiety can reduce the expression of viral N protein between at most about 0.2 fold, about 0.5 fold, about 1 fold, about 2 fold, about 5 fold, about 10 fold, about 20 fold, about 50 fold, about 100 fold, about 1,000 fold, or about 10,000 fold.

[0265] In some embodiments, the gene regulating moiety can reduce the expression of viral N protein by at least about 0.1 fold to about 10,000 fold. In some embodiments, the gene regulating moiety can reduce the expression of viral N protein by at least about 0.1 fold to about 0.2 fold, about 0.1 fold to about 0.5 fold, about 0.1 fold to about 1 fold, about 0.1 fold to about 2 fold, about 0.1 fold to about 5 fold, about 0.1 fold to about 10 fold, about 0.1 fold to about 20 fold, about 0.1 fold to about 50 fold, about 0.1 fold to about 100 fold, about 0.1 fold to about 1,000 fold, about 0.1 fold to about 10,000 fold, about 0.2 fold to about 0.5 fold, about 0.2 fold to about 1 fold, about 0.2 fold to about 2 fold, about 0.2 fold to about 5 fold, about 0.2 fold to about 10 fold, about 0.2 fold to about 20 fold, about 0.2 fold to about 50 fold, about 0.2 fold to about 100 fold, about 0.2 fold to about 1,000 fold, about 0.2 fold to about 10,000 fold, about 0.5 fold to about 1 fold, about 0.5 fold to about 2 fold, about 0.5 fold to about 5 fold, about 0.5 fold to about 10 fold, about 0.5 fold to about 20 fold, about 0.5 fold to about 50 fold, about 0.5 fold to about 100 fold, about 0.5 fold to about 1,000 fold, about 0.5 fold to about 10,000 fold, about 1 fold to about 2 fold, about 1 fold to about 5 fold, about 1 fold to about 10 fold, about 1 fold to about 20 fold, about 1 fold to about 50 fold, about 1 fold to about 100 fold, about 1 fold to about 1,000 fold, about 1 fold to about 10,000 fold, about 2 fold to about 5 fold, about 2 fold to about 10 fold, about 2 fold to about 20 fold, about 2 fold to about 50 fold, about 2 fold to about 100 fold, about 2 fold to about 1,000 fold, about 2 fold to about 10,000 fold, about 5 fold to about 10 fold, about 5 fold to about 20 fold, about 5 fold to about 50 fold, about 5 fold to about 100 fold, about 5 fold to about 1,000 fold, about 5 fold to about 10,000 fold, about 10 fold to about 20 fold, about 10 fold to about 50 fold, about 10 fold to about 100 fold, about 10 fold to about 1,000 fold, about 10 fold to about 10,000 fold, about 20 fold to about 50 fold, about 20 fold to about 100 fold, about 20 fold to about 1,000 fold, about 20 fold to about 10,000 fold, about 50 fold to about 100 fold, about 50 fold to about 1,000 fold, about 50 fold to about 10,000 fold, about 100 fold to about 1,000 fold, about 100 fold to about 10,000 fold, or about 1,000 fold to about 10,000 fold. In some embodiments, the gene regulating moiety can reduce the expression of viral N protein by at least about 0.1 fold, about 0.2 fold, about 0.5 fold, about 1 fold, about 2 fold, about 5 fold, about 10 fold, about 20 fold, about 50 fold, about 100 fold, about 1,000 fold, or about 10,000 fold. In some embodiments, the gene regulating moiety can reduce the expression of viral N protein by at least at least about 0.1 fold, about 0.2 fold, about 0.5 fold, about 1 fold, about 2 fold, about 5 fold, about 10 fold, about 20 fold, about 50 fold, about 100 fold, or about 1,000 fold. In some embodiments, the gene regulating moiety can reduce the expression of viral N protein by at least at most about 0.2 fold, about 0.5 fold, about 1 fold, about 2 fold, about 5 fold, about 10 fold, about 20 fold, about 50 fold, about 100 fold, about 1,000 fold, or about 10,000 fold.

[0266] In some embodiments, the gene regulating moiety can reduce the expression of viral N protein by at most about 0.1 fold to about 10,000 fold. In some embodiments, the gene regulating moiety can reduce the expression of viral N protein by at most about 0.1 fold to about 0.2 fold, about 0.1 fold to about 0.5 fold, about 0.1 fold to about 1 fold, about 0.1 fold to about 2 fold, about 0.1 fold to about 5 fold, about 0.1 fold to about 10 fold, about 0.1 fold to about 20 fold, about 0.1 fold to about 50 fold, about 0.1 fold to about 100 fold, about 0.1 fold to about 1,000 fold, about 0.1 fold to about 10,000 fold, about 0.2 fold to about 0.5 fold, about 0.2 fold to about 1 fold, about 0.2 fold to about 2 fold, about 0.2 fold to about 5 fold, about 0.2 fold to about 10 fold, about 0.2 fold to about 20 fold, about 0.2 fold to about 50 fold, about 0.2 fold to about 100 fold, about 0.2 fold to about 1,000 fold, about 0.2 fold to about 10,000 fold, about 0.5 fold to about 1 fold, about 0.5 fold to about 2 fold, about 0.5 fold to about 5 fold, about 0.5 fold to about 10 fold, about 0.5 fold to about 20 fold, about 0.5 fold to about 50 fold, about 0.5 fold to about 100 fold, about 0.5 fold to about 1,000 fold, about 0.5 fold to about 10,000 fold, about 1 fold to about 2 fold, about 1 fold to about 5 fold, about 1 fold to about 10 fold, about 1 fold to about 20 fold, about 1 fold to about 50 fold, about 1 fold to about 100 fold, about 1 fold to about 1,000 fold, about 1 fold to about 10,000 fold, about 2 fold to about 5 fold, about 2 fold to about 10 fold, about 2 fold to about 20 fold, about 2 fold to about 50 fold, about 2 fold to about 100 fold, about 2 fold to about 1,000 fold, about 2 fold to about 10,000 fold, about 5 fold to about 10 fold, about 5 fold to about 20 fold, about 5 fold to about 50 fold, about 5 fold to about 100 fold, about 5 fold to about 1,000 fold, about 5 fold to about 10,000 fold, about 10 fold to about 20 fold, about 10 fold to about 50 fold, about 10 fold to about 100 fold, about 10 fold to about 1,000 fold, about 10 fold to about 10,000 fold, about 20 fold to about 50 fold, about 20 fold to about 100 fold, about 20 fold to about 1,000 fold, about 20 fold to about 10,000 fold, about 50 fold to about 100 fold, about 50 fold to about 1,000 fold, about 50 fold to about 10,000 fold, about 100 fold to about 1,000 fold, about 100 fold to about 10,000 fold, or about 1,000 fold to about 10,000 fold. In some embodiments, the gene regulating moiety can reduce the expression of viral N protein by at most about 0.1 fold, about 0.2 fold, about 0.5 fold, about 1 fold, about 2 fold, about 5 fold, about 10 fold, about 20 fold, about 50 fold, about 100 fold, about 1,000 fold, or about 10,000 fold. In some embodiments, the gene regulating moiety can reduce the expression of viral N protein by at most at least about 0.1 fold, about 0.2 fold, about 0.5 fold, about 1 fold, about 2 fold, about 5 fold, about 10 fold, about 20 fold, about 50 fold, about 100 fold, or about 1,000 fold. In some embodiments, the gene regulating moiety can reduce the expression of viral N protein by at most at most about 0.2 fold, about 0.5 fold, about 1 fold, about 2 fold, about 5 fold, about 10 fold, about 20 fold, about 50 fold, about 100 fold, about 1,000 fold, or about 10,000 fold.

[0267] In some embodiments, the reduction of expression can be detected by measuring the amount of RNA encoding the targeted viral genome or viral gene in the cell and/or measuring the amount of polypeptide (e.g., the RdRP, N-protein, or a fragment thereof) in the cell that is encoded by the targeted viral gene.

[0268] In some embodiments, the gene regulating moiety can reduce the transfection of influenza virus between about 0.1 fold to about 10,000 fold. In some embodiments, the gene regulating moiety can reduce the transfection of influenza virus between about 0.1 fold to about 0.2 fold, about 0.1 fold to about 0.5 fold, about 0.1 fold to about 1 fold, about 0.1 fold to about 2 fold, about 0.1 fold to about 5 fold, about 0.1 fold to about 10 fold, about 0.1 fold to about 20 fold, about 0.1 fold to about 50 fold, about 0.1 fold to about 100 fold, about 0.1 fold to about 1,000 fold, about 0.1 fold to about 10,000 fold, about 0.2 fold to about 0.5 fold, about 0.2 fold to about 1 fold, about 0.2 fold to about 2 fold, about 0.2 fold to about 5 fold, about 0.2 fold to about 10 fold, about 0.2 fold to about 20 fold, about 0.2 fold to about 50 fold, about 0.2 fold to about 100 fold, about 0.2 fold to about 1,000 fold, about 0.2 fold to about 10,000 fold, about 0.5 fold to about 1 fold, about 0.5 fold to about 2 fold, about 0.5 fold to about 5 fold, about 0.5 fold to about 10 fold, about 0.5 fold to about 20 fold, about 0.5 fold to about 50 fold, about 0.5 fold to about 100 fold, about 0.5 fold to about 1,000 fold, about 0.5 fold to about 10,000 fold, about 1 fold to about 2 fold, about 1 fold to about 5 fold, about 1 fold to about 10 fold, about 1 fold to about 20 fold, about 1 fold to about 50 fold, about 1 fold to about 100 fold, about 1 fold to about 1,000 fold, about 1 fold to about 10,000 fold, about 2 fold to about 5 fold, about 2 fold to about 10 fold, about 2 fold to about 20 fold, about 2 fold to about 50 fold, about 2 fold to about 100 fold, about 2 fold to about 1,000 fold, about 2 fold to about 10,000 fold, about 5 fold to about 10 fold, about 5 fold to about 20 fold, about 5 fold to about 50 fold, about 5 fold to about 100 fold, about 5 fold to about 1,000 fold, about 5 fold to about 10,000 fold, about 10 fold to about 20 fold, about 10 fold to about 50 fold, about 10 fold to about 100 fold, about 10 fold to about 1,000 fold, about 10 fold to about 10,000 fold, about 20 fold to about 50 fold, about 20 fold to about 100 fold, about 20 fold to about 1,000 fold, about 20 fold to about 10,000 fold, about 50 fold to about 100 fold, about 50 fold to about 1,000 fold, about 50 fold to about 10,000 fold, about 100 fold to about 1,000 fold, about 100 fold to about 10,000 fold, or about 1,000 fold to about 10,000 fold. In some embodiments, the gene regulating moiety can reduce the transfection of influenza virus between about 0.1 fold, about 0.2 fold, about 0.5 fold, about 1 fold, about 2 fold, about 5 fold, about 10 fold, about 20 fold, about 50 fold, about 100 fold, about 1,000 fold, or about 10,000 fold. In some embodiments, the gene regulating moiety can reduce the transfection of influenza virus between at least about 0.1 fold, about 0.2 fold, about 0.5 fold, about 1 fold, about 2 fold, about 5 fold, about 10 fold, about 20 fold, about 50 fold, about 100 fold, or about 1,000 fold. In some embodiments, the gene regulating moiety can reduce the transfection of influenza virus between at most about 0.2 fold, about 0.5 fold, about 1 fold, about 2 fold, about 5 fold, about 10 fold, about 20 fold, about 50 fold, about 100 fold, about 1,000 fold, or about 10,000 fold.

[0269] In some embodiments, the gene regulating moiety can reduce the transfection of influenza virus by at least about 0.1 fold to about 10,000 fold. In some embodiments, the gene regulating moiety can reduce the transfection of influenza virus by at least about 0.1 fold to about 0.2 fold, about 0.1 fold to about 0.5 fold, about 0.1 fold to about 1 fold, about 0.1 fold to about 2 fold, about 0.1 fold to about 5 fold, about 0.1 fold to about 10 fold, about 0.1 fold to about 20 fold, about 0.1 fold to about 50 fold, about 0.1 fold to about 100 fold, about 0.1 fold to about 1,000 fold, about 0.1 fold to about 10,000 fold, about 0.2 fold to about 0.5 fold, about 0.2 fold to about 1 fold, about 0.2 fold to about 2 fold, about 0.2 fold to about 5 fold, about 0.2 fold to about 10 fold, about 0.2 fold to about 20 fold, about 0.2 fold to about 50 fold, about 0.2 fold to about 100 fold, about 0.2 fold to about 1,000 fold, about 0.2 fold to about 10,000 fold, about 0.5 fold to about 1 fold, about 0.5 fold to about 2 fold, about 0.5 fold to about 5 fold, about 0.5 fold to about 10 fold, about 0.5 fold to about 20 fold, about 0.5 fold to about 50 fold, about 0.5 fold to about 100 fold, about 0.5 fold to about 1,000 fold, about 0.5 fold to about 10,000 fold, about 1 fold to about 2 fold, about 1 fold to about 5 fold, about 1 fold to about 10 fold, about 1 fold to about 20 fold, about 1 fold to about 50 fold, about 1 fold to about 100 fold, about 1 fold to about 1,000 fold, about 1 fold to about 10,000 fold, about 2 fold to about 5 fold, about 2 fold to about 10 fold, about 2 fold to about 20 fold, about 2 fold to about 50 fold, about 2 fold to about 100 fold, about 2 fold to about 1,000 fold, about 2 fold to about 10,000 fold, about 5 fold to about 10 fold, about 5 fold to about 20 fold, about 5 fold to about 50 fold, about 5 fold to about 100 fold, about 5 fold to about 1,000 fold, about 5 fold to about 10,000 fold, about 10 fold to about 20 fold, about 10 fold to about 50 fold, about 10 fold to about 100 fold, about 10 fold to about 1,000 fold, about 10 fold to about 10,000 fold, about 20 fold to about 50 fold, about 20 fold to about 100 fold, about 20 fold to about 1,000 fold, about 20 fold to about 10,000 fold, about 50 fold to about 100 fold, about 50 fold to about 1,000 fold, about 50 fold to about 10,000 fold, about 100 fold to about 1,000 fold, about 100 fold to about 10,000 fold, or about 1,000 fold to about 10,000 fold. In some embodiments, the gene regulating moiety can reduce the transfection of influenza virus by at least about 0.1 fold, about 0.2 fold, about 0.5 fold, about 1 fold, about 2 fold, about 5 fold, about 10 fold, about 20 fold, about 50 fold, about 100 fold, about 1,000 fold, or about 10,000 fold. In some embodiments, the gene regulating moiety can reduce the transfection of influenza virus by at least at least about 0.1 fold, about 0.2 fold, about 0.5 fold, about 1 fold, about 2 fold, about 5 fold, about 10 fold, about 20 fold, about 50 fold, about 100 fold, or about 1,000 fold. In some embodiments, the gene regulating moiety can reduce the transfection of influenza virus by at least at most about 0.2 fold, about 0.5 fold, about 1 fold, about 2 fold, about 5 fold, about 10 fold, about 20 fold, about 50 fold, about 100 fold, about 1,000 fold, or about 10,000 fold.

[0270] In some embodiments, the gene regulating moiety can reduce the transfection of influenza virus by at most about 0.1 fold to about 10,000 fold. In some embodiments, the gene regulating moiety can reduce the transfection of influenza virus by at most about 0.1 fold to about 0.2 fold, about 0.1 fold to about 0.5 fold, about 0.1 fold to about 1 fold, about 0.1 fold to about 2 fold, about 0.1 fold to about 5 fold, about 0.1 fold to about 10 fold, about 0.1 fold to about 20 fold, about 0.1 fold to about 50 fold, about 0.1 fold to about 100 fold, about 0.1 fold to about 1,000 fold, about 0.1 fold to about 10,000 fold, about 0.2 fold to about 0.5 fold, about 0.2 fold to about 1 fold, about 0.2 fold to about 2 fold, about 0.2 fold to about 5 fold, about 0.2 fold to about 10 fold, about 0.2 fold to about 20 fold, about 0.2 fold to about 50 fold, about 0.2 fold to about 100 fold, about 0.2 fold to about 1,000 fold, about 0.2 fold to about 10,000 fold, about 0.5 fold to about 1 fold, about 0.5 fold to about 2 fold, about 0.5 fold to about 5 fold, about 0.5 fold to about 10 fold, about 0.5 fold to about 20 fold, about 0.5 fold to about 50 fold, about 0.5 fold to about 100 fold, about 0.5 fold to about 1,000 fold, about 0.5 fold to about 10,000 fold, about 1 fold to about 2 fold, about 1 fold to about 5 fold, about 1 fold to about 10 fold, about 1 fold to about 20 fold, about 1 fold to about 50 fold, about 1 fold to about 100 fold, about 1 fold to about 1,000 fold, about 1 fold to about 10,000 fold, about 2 fold to about 5 fold, about 2 fold to about 10 fold, about 2 fold to about 20 fold, about 2 fold to about 50 fold, about 2 fold to about 100 fold, about 2 fold to about 1,000 fold, about 2 fold to about 10,000 fold, about 5 fold to about 10 fold, about 5 fold to about 20 fold, about 5 fold to about 50 fold, about 5 fold to about 100 fold, about 5 fold to about 1,000 fold, about 5 fold to about 10,000 fold, about 10 fold to about 20 fold, about 10 fold to about 50 fold, about 10 fold to about 100 fold, about 10 fold to about 1,000 fold, about 10 fold to about 10,000 fold, about 20 fold to about 50 fold, about 20 fold to about 100 fold, about 20 fold to about 1,000 fold, about 20 fold to about 10,000 fold, about 50 fold to about 100 fold, about 50 fold to about 1,000 fold, about 50 fold to about 10,000 fold, about 100 fold to about 1,000 fold, about 100 fold to about 10,000 fold, or about 1,000 fold to about 10,000 fold. In some embodiments, the gene regulating moiety can reduce the transfection of influenza virus by at most about 0.1 fold, about 0.2 fold, about 0.5 fold, about 1 fold, about 2 fold, about 5 fold, about 10 fold, about 20 fold, about 50 fold, about 100 fold, about 1,000 fold, or about 10,000 fold. In some embodiments, the gene regulating moiety can reduce the transfection of influenza virus by at most at least about 0.1 fold, about 0.2 fold, about 0.5 fold, about 1 fold, about 2 fold, about 5 fold, about 10 fold, about 20 fold, about 50 fold, about 100 fold, or about 1,000 fold. In some embodiments, the gene regulating moiety can reduce the transfection of influenza virus by at most at most about 0.2 fold, about 0.5 fold, about 1 fold, about 2 fold, about 5 fold, about 10 fold, about 20 fold, about 50 fold, about 100 fold, about 1,000 fold, or about 10,000 fold.

[0271] In some embodiments, the reduction of expression can be detected by measuring the amount of RNA encoding the targeted viral genome or viral gene or viral gene segments in the cell and/or measuring the amount of polypeptide (e.g. PB2, PB2, PB1-F2, PA, HA, NP, NA, M1, M2, NS1, and/or NEP/NS2, or a fragment thereof) in the cell that is encoded by the targeted viral gene, or targeted viral gene segments.

[0272] In some embodiments, the at least one heterologous RNA polynucleotide comprising a nucleic acid sequence of any one SEQ ID NOs: 13601-13606 targets an endogenous gene of the cell being infected by any one of strain of the virus described herein. In some embodiments, the endogenous gene is a member of the peptidase family M1 such as aminopeptidase N (ANPEP), aminopeptidase A, leukotriene A4 hydrolase, Ape2 aminopeptidase, Aap1′ aminopeptidase, pyroglutamyl-peptidase II, cytosol alanyl aminopeptidase, cystinyl aminopeptidase, aminopeptidase G, aminopeptidase B, aminopeptidase Ey, endoplasmic reticulum aminopeptidase 1, tricom interacting factor F2, tricom interacting factor F3, arginyl aminopeptidase-like 1, ERAP2 aminopeptidase, aminopeptidase, aminopeptidase O, or Tata binding protein associated factor. In some embodiments, the endogenous gene targeted by the heterologous RNA polynucleotide is ANPEP. In some embodiments, the endogenous gene is a member of the minor histocompatibility antigen family such as AKAP13, APOBEC3B, ARHGDIB, BCAT2, BCL2A1, CD19, CENPM, CTSH, C19orf48, DDX3Y, DPH1, EBI3, ERAP1, ERBB2, GEMIN4, HEATR1, ARHGAP45, HMHB1, HMSD, KDM5D, PUM3, RESF1, LY75, MR1, MTHFD1, MYO1G, NUP133, PDCD11, PI4K2B, PKN3, PRCP, PTK2B, P2RX5, RPS4Y1, SLC1A5, SLC19A1, SON, SP110, SSR1, SWAP70, TMSB4Y, TOR3A, TRIM22, TRIM42, TRIP10, TYMP, UGT2B17, USP9Y, UTY, WNK1, or ZNF419. In some embodiments, the endogenous gene targeted by the heterologous RNA polynucleotide is MTHFD1. In some embodiments, the endogenous gene is a member of the type II transmembrane serine protease family such as HAT/DESC subfamily: HAT, DESC1, TMPRSS11A, HAT-like 2, HAT-like 3, HAT-like 4, HAT-like 5; Hepsin/TMPRSS subfamily: Hepsin, TMPRSS2, TMPRSS3, TMPRSS4, MSPL, Spinesin, Enteropeptidase; Matriptase subfamily: Matriptase, Matriptase-2, Matripase-3, Polyserease-1; and Corin subfamily Corin. In some embodiments, the endogenous gene targeted by the heterologous RNA polynucleotide is TMPRSS2.

[0273] In some embodiments, the at least one heterologous RNA polynucleotide comprising a nucleic acid sequence of any one of SEQ ID NOs: 13607-13649 or 13701-13729 can target the RdRP. N-protein, or the viral genome of any one strain of the coronavirus described herein. In some embodiments, a combination of the at least one heterologous RNA polynucleotide comprising a nucleic acid sequence of any one of SEQ ID NOs: 13651-13664 or 13671-13684 can target any one strain of the virus described herein. In some embodiments, a combination of the at least one heterologous RNA polynucleotide comprising a nucleic acid sequence of any one of SEQ ID NOs: 13651-13664 or 13671-13684 can target viral genome of at least about 500, 1000, 5000, 10000, 15000, 20000, 21000, 22000, 23000, 24000, 25000, 30000, or more strains of virus. of any one of the strain of the virus described herein. In some embodiments, a combination of the at least one heterologous RNA polynucleotide comprising a nucleic acid sequence of any one of SEQ ID NOs: 13651-13664 or 13671-13684 can target viral genome of at least about 500, 1000, 5000, 10000, 15000, 20000, 21000, 22000, 23000, 24000, 25000, 30000, or more strains of virus. of any one of the strain of the RNA virus described herein. Non-limiting examples of the RNA virus include RNA virus families of Coronaviridae, Pneumoviridae, Paramyxoviridae, Caliciviridae, Hepeviridae, Picomaviridae, Filoviridae, Flaviviridae, Rhabdoviridae, or Togaviridae.

[0274] C. Heterologous Nucleic Acid Polynucleotide

[0275] In some cases, the systems and methods described herein comprise at least one heterologous nucleic acid polynucleotide. In some cases, the systems and methods described herein comprise a plurality of heterologous nucleic acids. In some embodiments, the polynucleotide can be deoxyribonucleic acid (DNA). In some cases, the DNA sequence can be single-stranded or doubled-stranded. In some embodiments, the at least one heterologous nucleic acid polynucleotide can be ribonucleic acid (RNA).

[0276] In some embodiments, the gene regulating moiety can be complexed with the at least one heterologous RNA polynucleotide. The at least one heterologous RNA polynucleotide can comprise a nucleic-acid targeting region that comprises a complementary sequence to a nucleic acid sequence on the targeted polynucleotide such as the targeted viral genomes, viral genes, or transcripts of the viral genomes or viral genes to confer the sequence specificity of gene regulating moiety-dependent targeting. In some embodiments, the at least one heterologous RNA polynucleotide can be guide nucleic acid (or guide RNA) comprising two separate nucleic acid molecules, which can be referred to as a double guide nucleic acid or a single nucleic acid molecule, which can be referred to as a single guide nucleic acid (e.g., sgRNA). In some embodiments, the guide nucleic acid is a single guide nucleic acid comprising a fused CRISPR RNA (crRNA) and a transactivating crRNA (tracrRNA). In some embodiments, the guide nucleic acid is a single guide nucleic acid comprising a crRNA. In some embodiments, the guide nucleic acid is a single guide nucleic acid comprising a crRNA but lacking a tracRNA. In some embodiments, the guide nucleic acid is a double guide nucleic acid comprising non-fused crRNA and tracrRNA. An exemplary double guide nucleic acid can comprise a crRNA-like molecule and a tracrRNA-like molecule. An exemplary single guide nucleic acid can comprise a crRNA-like molecule. An exemplary single guide nucleic acid can comprise a fused crRNA-like molecule and a tracrRNA-like molecule.

[0277] A crRNA can comprise the nucleic acid-targeting segment (e.g., spacer region) of the guide nucleic acid and a stretch of nucleotides that can form one half of a double-stranded duplex of the Cas protein-binding segment of the guide nucleic acid.

[0278] A tracrRNA can comprise a stretch of nucleotides that forms the other half of the double-stranded duplex of the Cas protein-binding segment of the gRNA. A stretch of nucleotides of a crRNA can be complementary to and hybridize with a stretch of nucleotides of a tracrRNA to form the double-stranded duplex of the Cas protein-binding domain of the guide nucleic acid.

[0279] The crRNA and tracrRNA can hybridize to form a guide nucleic acid. The crRNA can also provide a single-stranded nucleic acid targeting segment (e.g., a spacer region) that hybridizes to a target nucleic acid recognition sequence (e.g., protospacer). The sequence of a crRNA, including spacer region, or tracrRNA molecule can be designed to be specific to the species in which the guide nucleic acid is to be used.

[0280] In some embodiments, the nucleic acid-targeting region of a guide nucleic acid can be between 18 to 72 nucleotides in length. The nucleic acid-targeting region of a guide nucleic acid (e.g., spacer region) can have a length of from about 12 nucleotides to about 100 nucleotides. For example, the nucleic acid-targeting region of a guide nucleic acid (e.g., spacer region) can have a length of from about 12 nucleotides (nt) to about 80 nt, from about 12 nt to about 50 nt, from about 12 nt to about 40 nt, from about 12 nt to about 30 nt, from about 12 nt to about 25 nt, from about 12 nt to about 20 nt, from about 12 nt to about 19 nt, from about 12 nt to about 18 nt, from about 12 nt to about 17 nt, from about 12 nt to about 16 nt, or from about 12 nt to about 15 nt. Alternatively, the DNA-targeting segment can have a length of from about 18 nt to about 20 nt, from about 18 nt to about 25 nt, from about 18 nt to about 30 nt, from about 18 nt to about 35 nt, from about 18 nt to about 40 nt, from about 18 nt to about 45 nt, from about 18 nt to about 50 nt, from about 18 nt to about 60 nt, from about 18 nt to about 70 nt, from about 18 nt to about 80 nt, from about 18 nt to about 90 nt, from about 18 nt to about 100 nt, from about 20 nt to about 25 nt, from about 20 nt to about 30 nt, from about 20 nt to about 35 nt, from about 20 nt to about 40 nt, from about 20 nt to about 45 nt, from about 20 nt to about 50 nt, from about 20 nt to about 60 nt, from about 20 nt to about 70 nt, from about 20 nt to about 80 nt, from about 20 nt to about 90 nt, or from about 20 nt to about 100 nt. The length of the nucleic acid-targeting region can be at least 5, 10, 15, 16, 17, 18, 19, 20, 21, 22, 23, 24, 25, 30 or more nucleotides. The length of the nucleic acid-targeting region (e.g., spacer sequence) can be at most 5, 10, 15, 16, 17, 18, 19, 20, 21, 22, 23, 24, 25, 30 or more nucleotides.

[0281] In some embodiments, the nucleic acid-targeting region of a guide nucleic acid (e.g., spacer) is 20 nucleotides in length. In some embodiments, the nucleic acid-targeting region of a guide nucleic acid is 19 nucleotides in length. In some embodiments, the nucleic acid-targeting region of a guide nucleic acid is 18 nucleotides in length. In some embodiments, the nucleic acid-targeting region of a guide nucleic acid is 17 nucleotides in length. In some embodiments, the nucleic acid-targeting region of a guide nucleic acid is 16 nucleotides in length. In some embodiments, the nucleic acid-targeting region of a guide nucleic acid is 21 nucleotides in length. In some embodiments, the nucleic acid-targeting region of a guide nucleic acid is 22 nucleotides in length.

[0282] The nucleotide sequence of the guide nucleic acid that is complementary to a nucleotide sequence (target sequence) of the target nucleic acid can have a length of, for example, at least about 12 nt, at least about 15 nt, at least about 18 nt, at least about 19 nt, at least about 20 nt, at least about 25 nt, at least about 30 nt, at least about 35 nt or at least about 40 nt. The nucleotide sequence of the guide nucleic acid that is complementary to a nucleotide sequence (target sequence) of the target nucleic acid can have a length of from about 12 nucleotides (nt) to about 80 nt, from about 12 nt to about 50 nt, from about 12 nt to about 45 nt, from about 12 nt to about 40 nt, from about 12 nt to about 35 nt, from about 12 nt to about 30 nt, from about 12 nt to about 25 nt, from about 12 nt to about 20 nt, from about 12 nt to about 19 nt, from about 19 nt to about 20 nt, from about 19 nt to about 25 nt, from about 19 nt to about 30 nt, from about 19 nt to about 35 nt, from about 19 nt to about 40 nt, from about 19 nt to about 45 nt, from about 19 nt to about 50 nt, from about 19 nt to about 60 nt, from about 20 nt to about 25 nt, from about 20 nt to about 30 nt, from about 20 nt to about 35 nt, from about 20 nt to about 40 nt, from about 20 nt to about 45 nt, from about 20 nt to about 50 nt, or from about 20 nt to about 60 nt.

[0283] A protospacer sequence of a targeted polynucleotide can be identified by identifying a PAM within a region of interest and selecting a region of a desired size upstream or downstream of the PAM as the protospacer. A corresponding spacer sequence can be designed by determining the complementary sequence of the protospacer region.

[0284] A spacer sequence can be identified using a computer program (e.g., machine readable code). The computer program can use variables such as predicted melting temperature, secondary structure formation, and predicted annealing temperature, sequence identity, genomic context, chromatin accessibility. % GC, frequency of genomic occurrence, methylation status, presence of SNPs, and the like.

[0285] The percent complementarity between the nucleic acid-targeting sequence (e.g., a spacer sequence of the at least one heterologous polypeptide as disclosed herein) and the target nucleic acid (e.g., a protospacer sequence of the one or more target viral genes as disclosed herein) can be at least 50%, at least 60%, at least 70%, at least 75%, at least 80%, at least 85%, at least 90%, at least 95%, at least 97%, at least 98%, at least 99%, or 100%. The percent complementarity between the nucleic acid-targeting sequence and the target nucleic acid can be at least 60%, at least 70%, at least 75%, at least 80%, at least 85%, at least 90%, at least 95%, at least 97%, at least 98%, at least 99%, or 100% over about 20 contiguous nucleotides.

[0286] The Cas protein-binding segment of a guide nucleic acid can comprise two stretches of nucleotides (e.g., crRNA and tracrRNA) that are complementary to one another. The two stretches of nucleotides (e.g., crRNA and tracrRNA) that are complementary to one another can be covalently linked by intervening nucleotides (e.g., a linker in the case of a single guide nucleic acid). The two stretches of nucleotides (e.g., crRNA and tracrRNA) that are complementary to one another can hybridize to form a double stranded RNA duplex or hairpin of the Cas protein-binding segment, thus resulting in a stem-loop structure. The crRNA and the tracrRNA can be covalently linked via the 3′ end of the crRNA and the 5′ end of the tracrRNA. Alternatively, tracrRNA and crRNA can be covalently linked via the 5′ end of the tracrRNA and the 3′ end of the crRNA.

[0287] The Cas protein binding segment of a guide nucleic acid can have a length of from about 10 nucleotides to about 100 nucleotides, e.g., from about 10 nucleotides (nt) to about 20 nt, from about 20 nt to about 30 nt, from about 30 nt to about 40 nt, from about 40 nt to about 50 nt, from about 50 nt to about 60 nt, from about 60 nt to about 70 nt, from about 70 nt to about 80 nt, from about 80 nt to about 90 nt, or from about 90 nt to about 100 nt. For example, the Cas protein-binding segment of a guide nucleic acid can have a length of from about 15 nucleotides (nt) to about 80 nt, from about 15 nt to about 50 nt, from about 15 nt to about 40 nt, from about 15 nt to about 30 nt or from about 15 nt to about 25 nt.

[0288] The dsRNA duplex of the Cas protein-binding segment of the guide nucleic acid can have a length from about 6 base pairs (bp) to about 50 bp. For example, the dsRNA duplex of the protein-binding segment can have a length from about 6 bp to about 40 bp, from about 6 bp to about 30 bp, from about 6 bp to about 25 bp, from about 6 bp to about 20 bp, from about 6 bp to about 15 bp, from about 8 bp to about 40 bp, from about 8 bp to about 30 bp, from about 8 bp to about 25 bp, from about 8 bp to about 20 bp or from about 8 bp to about 15 bp. For example, the dsRNA duplex of the Cas protein-binding segment can have a length from about from about 8 bp to about 10 bp, from about 10 bp to about 15 bp, from about 15 bp to about 18 bp, from about 18 bp to about 20 bp, from about 20 bp to about 25 bp, from about 25 bp to about 30 bp, from about 30 bp to about 35 bp, from about 35 bp to about 40 bp, or from about 40 bp to about 50 bp.

[0289] In some embodiments, the dsRNA duplex of the Cas protein-binding segment can have a length of 36 base pairs. The percent complementarity between the nucleotide sequences that hybridize to form the dsRNA duplex of the protein-binding segment can be at least about 60%. For example, the percent complementarity between the nucleotide sequences that hybridize to form the dsRNA duplex of the protein-binding segment can be at least about 65%, at least about 70%, at least about 75%, at least about 80%, at least about 85%, at least about 90%, at least about 95%, at least about 98%, or at least about 99%. In some cases, the percent complementarity between the nucleotide sequences that hybridize to form the dsRNA duplex of the protein-binding segment is 100%.

[0290] The linker (e.g., that links a crRNA and a tracrRNA in a single guide nucleic acid) can have a length of from about 3 nucleotides to about 100 nucleotides. For example, the linker can have a length of from about 3 nucleotides (nt) to about 90 nt, from about 3 nucleotides (nt) to about 80 nt, from about 3 nucleotides (nt) to about 70 nt, from about 3 nucleotides (nt) to about 60 nt, from about 3 nucleotides (nt) to about 50 nt, from about 3 nucleotides (nt) to about 40 nt, from about 3 nucleotides (nt) to about 30 nt, from about 3 nucleotides (nt) to about 20 nt or from about 3 nucleotides (nt) to about 10 nt. For example, the linker can have a length of from about 3 nt to about 5 nt, from about 5 nt to about 10 nt, from about 10 nt to about 15 nt, from about 15 nt to about 20 nt, from about 20 nt to about 25 nt, from about 25 nt to about 30 nt, from about 30 nt to about 35 nt, from about 35 nt to about 40 nt, from about 40 nt to about 50 nt, from about 50 nt to about 60 nt, from about 60 nt to about 70 nt, from about 70 nt to about 80 nt, from about 80 nt to about 90 nt, or from about 90 nt to about 100 nt. In some embodiments, the linker of a DNA-targeting RNA is 4 nt.

[0291] Guide nucleic acids of the disclosure can include modifications or sequences that provide for additional desirable features (e.g., modified or regulated stability, subcellular targeting; tracking with a fluorescent label; a binding site for a protein or protein complex; and the like). Examples of such modifications include, for example, a 5′ cap (a 7-methylguanylate cap (m7G)); a 3′ polyadenylated tail (a 3′ poly(A) tail); a riboswitch sequence (e.g., to allow for regulated stability and/or regulated accessibility by proteins and/or protein complexes); a stability control sequence: a sequence that forms a dsRNA duplex (a hairpin)); a modification or sequence that targets the RNA to a subcellular location (e.g., nucleus, mitochondria, chloroplasts, and the like); a modification or sequence that provides for tracking (e.g., direct conjugation to a fluorescent molecule, conjugation to a moiety that facilitates fluorescent detection, a sequence that allows for fluorescent detection, and so forth); a modification or sequence that provides a binding site for proteins (e.g., proteins that act on DNA, including transcriptional activators, transcriptional repressors, DNA methyl transferases, DNA demethylases, histone acetyltransferases, histone deacetylases, and combinations thereof.

[0292] A guide nucleic acid can comprise one or more modifications (e.g., a base modification, a backbone modification), to provide the nucleic acid with a new or enhanced feature (e.g., improved stability). A guide nucleic acid can comprise a nucleic acid affinity tag. A nucleoside can be a base-sugar combination. The base portion of the nucleotide can be a heterocyclic base. The two most common classes of such heterocyclic bases are the purines and the pyrimidines. Nucleotides can be nucleosides that further include a phosphate group covalently linked to the sugar portion of the nucleoside. For those nucleosides that include a pentofuranosyl sugar, the phosphate group can be linked to the 2′, the 3′, or the 5′ hydroxyl moiety of the sugar. In forming guide nucleic acids, the phosphate groups can covalently link adjacent nucleosides to one another to form a linear polymeric compound. In turn, the respective ends of this linear polymeric compound can be further joined to form a circular compound; however, linear compounds can be suitable. In addition, linear compounds can have internal nucleotide base complementarity and can therefore fold in a manner as to produce a fully or partially double-stranded compound. Further, within guide nucleic acids, the phosphate groups can commonly be referred to as forming the internucleoside backbone of the guide nucleic acid. The linkage or backbone of the guide nucleic acid can be a 3′ to 5′ phosphodiester linkage.

[0293] A guide nucleic acid can comprise a modified backbone and/or modified internucleoside linkages. Modified backbones can include those that retain a phosphorus atom in the backbone and those that do not have a phosphorus atom in the backbone.

[0294] Suitable modified guide nucleic acid backbones containing a phosphorus atom therein can include, for example, phosphorothioates, chiral phosphorothioates, phosphorodithioates, phosphotriesters, aminoalkylphosphotriesters, methyl and other alkyl phosphonates such as 3′-alkylene phosphonates, 5′-alkylene phosphonates, chiral phosphonates, phosphinates, phosphoramidates including 3′-amino phosphoramidate and aminoalkylphosphoramidates, phosphorodiamidates, thionophosphoramidates, thionoalkylphosphonates, thionoalkylphosphotriesters, selenophosphates, and boranophosphates having normal 3′-5′ linkages, 2′-5′ linked analogs, and those having inverted polarity wherein one or more internucleotide linkages is a 3 to 3′, a 5′ to 5′ or a 2′ to 2′ linkage. Suitable guide nucleic acids having inverted polarity can comprise a single 3′ to 3′ linkage at the 3′-most internucleotide linkage (such as a single inverted nucleoside residue in which the nucleobase is missing or has a hydroxyl group in place thereof). Various salts (e.g., potassium chloride or sodium chloride), mixed salts, and free acid forms can also be included.

[0295] A guide nucleic acid can comprise one or more phosphorothioate and/or heteroatom internucleoside linkages, in particular —CH2-NH—O—CH2-, —CH2-N(CH3)-O—CH2- (a methylene (methylimino) or MMI backbone), —CH2-O—N(CH3)-CH2-, —CH2-N(CH3)-N(CH3)-CH2- and —O—N(CH3)-CH2-CH2- (wherein the native phosphodiester internucleotide linkage is represented as —O—P(═O)(OH)—O—CH2-).

[0296] A guide nucleic acid can comprise a morpholino backbone structure. For example, a nucleic acid can comprise a 6-membered morpholino ring in place of a ribose ring. In some of these embodiments, a phosphorodiamidate or other non-phosphodiester internucleoside linkage replaces a phosphodiester linkage.

[0297] A guide nucleic acid can comprise polynucleotide backbones that are formed by short chain alkyl or cycloalkyl internucleoside linkages, mixed heteroatom and alkyl or cycloalkyl internucleoside linkages, or one or more short chain heteroatomic or heterocyclic internucleoside linkages. These can include those having morpholino linkages (formed in part from the sugar portion of a nucleoside); siloxane backbones; sulfide, sulfoxide and sulfone backbones; formacetyl and thioformacetyl backbones; methylene formacetyl and thioformacetyl backbones; riboacetyl backbones; alkene containing backbones; sulfamate backbones; methyleneimino and methylenehydrazino backbones; sulfonate and sulfonamide backbones; amide backbones; and others having mixed N, O, S and CH2 component parts.

[0298] A guide nucleic acid can comprise a nucleic acid mimetic. The term “mimetic” can be intended to include polynucleotides wherein only the furanose ring or both the furanose ring and the internucleotide linkage are replaced with non-furanose groups, replacement of only the furanose ring can also be referred as being a sugar surrogate. The heterocyclic base moiety or a modified heterocyclic base moiety can be maintained for hybridization with an appropriate target nucleic acid. One such nucleic acid can be a peptide nucleic acid (PNA). In a PNA, the sugar-backbone of a polynucleotide can be replaced with an amide containing backbone, in particular an aminoethylglycine backbone. The nucleotides can be retained and are bound directly or indirectly to aza nitrogen atoms of the amide portion of the backbone. The backbone in PNA compounds can comprise two or more linked aminoethylglycine units which gives PNA an amide containing backbone. The heterocyclic base moieties can be bound directly or indirectly to aza nitrogen atoms of the amide portion of the backbone.

[0299] A guide nucleic acid can comprise linked morpholino units (morpholino nucleic acid) having heterocyclic bases attached to the morpholino ring. Linking groups can link the morpholino monomeric units in a morpholino nucleic acid. Non-ionic morpholino-based oligomeric compounds can have less undesired interactions with cellular proteins. Morpholino-based polynucleotides can be non-ionic mimics of guide nucleic acids. A variety of compounds within the morpholino class can be joined using different linking groups. A further class of polynucleotide mimetic can be referred to as cyclohexenyl nucleic acids (CeNA). The furanose ring normally present in a nucleic acid molecule can be replaced with a cyclohexenyl ring. CeNA DMT protected phosphoramidite monomers can be prepared and used for oligomeric compound synthesis using phosphoramidite chemistry. The incorporation of CeNA monomers into a nucleic acid chain can increase the stability of a DNA/RNA hybrid. CeNA oligoadenylates can form complexes with nucleic acid complements with similar stability to the native complexes. A further modification can include Locked Nucleic Acids (LNAs) in which the 2′-hydroxyl group is linked to the 4′ carbon atom of the sugar ring thereby forming a 2′-C,4′-C-oxymethylene linkage thereby forming a bicyclic sugar moiety. The linkage can be a methylene (—CH2-), group bridging the 2 oxygen atom and the 4′ carbon atom wherein n is 1 or 2. LNA and LNA analogs can display very high duplex thermal stabilities with complementary nucleic acid (Tm=+3 to +10° C.), stability towards 3′-exonucleolytic degradation and good solubility properties.

[0300] A guide nucleic acid can comprise one or more substituted sugar moieties. Suitable polynucleotides can comprise a sugar substituent group selected from: OH; F: O-, S-, or N-alkyl; O-, S-, or N-alkenyl; O-, S- or N-alkynyl; or O-alkyl-O-alkyl, wherein the alkyl, alkenyl and alkynyl can be substituted or unsubstituted C1 to C10 alkyl or C2 to C10 alkenyl and alkynyl. Particularly suitable are O((CH2)nO) mCH3, O(CH2)nOCH3, O(CH2)nNH2, O(CH2)nCH3, O(CH2)nONH2, and O(CH2)nON((CH2)nCH3)2, where n and m are from 1 to about 10. A sugar substituent group can be selected from: C1 to C10 lower alkyl, substituted lower alkyl, alkenyl, alkynyl, alkaryl, aralkyl, O-alkaryl or O-aralkyl. SH, SCH3, OCN, Cl, Br, CN, CF3, OCF3, SOCH3, SO2CH3, ONO2, NO2, N3, NH2, heterocycloalkyl, heterocycloalkaryl, aminoalkylamino, polyalkylamino, substituted silyl, an RNA cleaving group, a reporter group, an intercalator, a group for improving the pharmacokinetic properties of an guide nucleic acid, or a group for improving the pharmacodynamic properties of an guide nucleic acid, and other substituents having similar properties. A suitable modification can include 2′-methoxyethoxy (2′-O—CH2 CH2OCH3, also known as 2′-O-(2-methoxyethyl) or 2′-MOE, an alkoxyalkoxy group). A further suitable modification can include 2′-dimethylaminooxyethoxy, (a O(CH2)2ON(CH3)2 group, also known as 2′-DMAOE), and 2′-dimethylaminoethoxyethoxy (also known as 2′-O-dimethyl-amino-ethoxy-ethyl or 2′-DMAEOE), 2′-O—CH2-O—CH2-N(CH3)2.

[0301] Other suitable sugar substituent groups can include methoxy (—O—CH3), aminopropoxy (—O CH2 CH2NH2), allyl (—CH2-CH═CH2), —O-allyl (—O—CH2-CH═CH2) and fluoro (F). 2′-sugar substituent groups can be in the arabino (up) position or ribo (down) position. A suitable 2′-arabino modification is 2′-F. Similar modifications can also be made at other positions on the oligomeric compound, particularly the 3′ position of the sugar on the 3′ terminal nucleoside or in 2′-5′ linked nucleotides and the 5′ position of 5′ terminal nucleotide. Oligomeric compounds can also have sugar mimetics such as cyclobutyl moieties in place of the pentofuranosyl sugar.

[0302] A guide nucleic acid can also include nucleobase (or “base”) modifications or substitutions. As used herein, “unmodified” or “natural” nucleobases can include the purine bases, (e.g. adenine (A) and guanine (G)), and the pyrimidine bases, (e.g. thymine (T), cytosine (C) and uracil (U)). Modified nucleobases can include other synthetic and natural nucleobases such as 5-methylcytosine (5-me-C), 5-hydroxymethyl cytosine, xanthine, hypoxanthine, 2-aminoadenine, 6-methyl and other alkyl derivatives of adenine and guanine, 2-propyl and other alkyl derivatives of adenine and guanine, 2-thiouracil, 2-thiothymine and 2-thiocytosine, 5-halouracil and cytosine, 5-propynyl (—C═C—CH3) uracil and cytosine and other alkynyl derivatives of pyrimidine bases, 6-azo uracil, cytosine and thymine, 5-uracil (pseudouracil), 4-thiouracil, 8-halo, 8-amino, 8-thiol, 8-thioalkyl, 8-hydroxyl and other 8-substituted adenines and guanines, 5-halo particularly 5-bromo, 5-trifluoromethyl and other 5-substituted uracils and cytosines, 7-methylguanine and 7-methyladenine, 2-F-adenine, 2-amino-adenine, 8-azaguanine and 8-azaadenine, 7-deazaguanine and 7-deazaadenine and 3-deazaguanine and 3-deazaadenine. Modified nucleobases can include tricyclic pyrimidines such as phenoxazine cytidine(1H-pyrimido(5,4-b)(1,4)benzoxazin-2(3H)-one), phenothiazine cytidine (1H-pyrimido(5,4-b)(1,4)benzothiazin-2(3H)-one), G-clamps such as a substituted phenoxazine cytidine (e.g. 9-(2-aminoethoxy)-H-pyrimido(5,4-(b) (1,4)benzoxazin-2(3H)-one), carbazole cytidine (2H-pyrimido(4,5-b)indol-2-one), pyridoindole cytidine (H-pyrido(3′,2′:4,5)pyrrolo(2,3-d)pyrimidin-2-one).

[0303] Heterocyclic base moieties can include those in which the purine or pyrimidine base is replaced with other heterocycles, for example: 7-deaza-adenine, 7-deazaguanosine, 2-aminopyridine and 2-pyridone. Nucleobases can be useful for increasing the binding affinity of a polynucleotide compound. These can include 5-substituted pyrimidines, 6-azapyrimidines and N-2, N-6 and O-6 substituted purines, including 2-aminopropyladenine, 5-propynyluracil and 5-propynylcytosine, 5-methylcytosine substitutions can increase nucleic acid duplex stability by 0.6-1.2° C. and can be suitable base substitutions (e.g., when combined with 2′-O-methoxyethyl sugar modifications).

[0304] A modification of a guide nucleic acid can comprise chemically linking to the guide nucleic acid one or more moieties or conjugates that can enhance the activity, cellular distribution or cellular uptake of the guide nucleic acid. These moieties or conjugates can include conjugate groups covalently bound to functional groups such as primary or secondary hydroxyl groups. Conjugate groups can include, but are not limited to, intercalators, reporter molecules, polyamines, polyamides, polyethylene glycols, polyethers, groups that enhance the pharmacodynamic properties of oligomers, and groups that can enhance the pharmacokinetic properties of oligomers. Conjugate groups can include, but are not limited to, cholesterols, lipids, phospholipids, biotin, phenazine, folate, phenanthridine, anthraquinone, acridine, fluoresceins, rhodamines, coumarins, and dyes. Groups that enhance the pharmacodynamic properties include groups that improve uptake, enhance resistance to degradation, and/or strengthen sequence-specific hybridization with the target nucleic acid. Groups that can enhance the pharmacokinetic properties include groups that improve uptake, distribution, metabolism or excretion of a nucleic acid. Conjugate moieties can include but are not limited to lipid moieties such as a cholesterol moiety, cholic acid a thioether, (e.g., hexyl-S-tritylthiol), a thiocholesterol, an aliphatic chain (e.g., dodecandiol or undecyl residues), a phospholipid (e.g., di-hexadecyl-rac-glycerol or triethylammonium 1,2-di-O-hexadecyl-rac-glycero-3-H-phosphonate), a polyamine or a polyethylene glycol chain, or adamantane acetic acid, a palmityl moiety, or an octadecylamine or hexylamino-carbonyl-oxycholesterol moiety.

[0305] In some embodiments, the at least one heterologous RNA polynucleotide can bind to at least a portion of the viral genomes, viral genes, or transcripts of the viral genomes and viral genes. In some cases, the at least one heterologous RNA polynucleotide is capable forming a complex with the gene regulating moiety to direct the gene regulating moiety to target the portion of the viral genomes, viral genes, or transcripts of the viral genomes and viral genes. In some embodiments, the at least one heterologous RNA polynucleotide is capable forming a complex with the gene regulating moiety to direct the gene regulating moiety to target the portion of the viral genomes, viral genes, or transcripts of the viral genomes and viral genes for cleavage or degradation. In some instances, the at least one heterologous RNA polynucleotide is capable forming a complex with the gene regulating moiety to direct the gene regulating moiety to reduce expression of the targeted portion of the viral genomes or viral genes.

[0306] In some embodiments, the at least one heterologous RNA polynucleotide can be complementary and bind to the viral genomes, viral genes, or transcripts of the viral genomes and viral genes as described herein. In some embodiments, the at least one heterologous RNA polynucleotide can be complementary and bind to viral genomes, viral genes, or transcripts of the viral genomes and viral genes of coronavirus. In some embodiments, the at least one heterologous RNA polynucleotide can be complementary and bind to viral genomes, viral genes, or transcripts of the viral genomes and viral genes of alphacoronavirus, betacoronavirus, deltacoronavirus, or gammacoronavirus. Examples of alphacoronavirus can include, but are not limited to, Bat coronavirus CDPHE15, Bat coronavirus HKU10, Human coronavirus 229E, Human coronavirus NL63, Miniopterus bat coronavirus 1. Miniopterus bat coronavirus HKU8, Mink coronavirus 1, Porcine epidemic diarrhoea virus, Rhinolophus bat coronavirus HKU2, and Scotophilus bat coronavirus 512. Examples of betacoronavirus can include, but are not limited to, Betacoronavirus 1, Hedgehog coronavirus 1, Human coronavirus HKU1, Middle East respiratory syndrome-related coronavirus, Murine coronavirus, Pipistrellus bat coronavirus HKU5, Rousettus bat coronavirus HKU9, Severe acute respiratory syndrome-related coronavirus. Tylonycteris bat coronavirus HKU4. Examples of deltacoronavirus can include, but are not limited to, Bulbul coronavirus HKU11, Common moorhen coronavirus HKU21, Coronavirus HKU15, Munia coronavirus HKU13, Night heron coronavirus HKU19, Thrush coronavirus HKU12, White-eye coronavirus HKU16, Wigeon coronavirus HKU20. Examples of gammacoronavirus can include, but are not limited to, Avian coronavirus, Beluga whale coronavirus SW1. Additional examples of coronavirus can include MERS-CoV, SARS-CoV, and SARS-Cov-2 (i.e., SARS-COV-2). In some embodiments, the at least one heterologous RNA polynucleotide can be complementary and bind to the viral genomes, viral genes, or transcripts of the viral genomes and viral genes of SARS-COV-2. Exemplary SARS-COV-2 viral genes that can be targeted and bound by the at least one heterologous RNA polynucleotide can include orf1a, orf1ab, S (spike), 3a, 3b, E (envelope protein), M (matrix protein), p6, 7a, 7b, 8b, 9b, N (nucleocapsid), orf14, nsp1 (leader protein), nsp2, nsp3, nsp4, nsp5 (3C-like proteinase), nsp6, nsp7, nsp8, nsp9, nsp10 (growth-factor-like protein), nsp12 (RNA-dependent RNA polymerase, or RdRP), nsp13 (RNA 5′-triphosphatase), nsp14 (3′-to-5′ exonuclease), nsp15 (endoRNAse), and nsp16 (2′-O-ribose methyltransferase).

[0307] In some embodiments, the at least one heterologous RNA polynucleotide complementary to the viral genomes, viral genes, or transcripts of the viral genomes and viral genes of SARS-COV-2 comprises at most 5 mismatches when optimally aligned with MERS and/or SARS viral genomes. In some embodiments, the at least one heterologous RNA polynucleotide complementary to the viral genomes, viral genes, or transcripts of the viral genomes and viral genes of SARS-COV-2 comprises at most 4 mismatches when optimally aligned with MERS and/or SARS viral genomes. In some embodiments, the at least one heterologous RNA polynucleotide complementary to the viral genomes, viral genes, or transcripts of the viral genomes and viral genes of SARS-COV-2 comprises at most 3 mismatches when optimally aligned with MERS and/or SARS viral genomes. In some embodiments, the at least one heterologous RNA polynucleotide complementary to the viral genomes, viral genes, or transcripts of the viral genomes and viral genes of SARS-COV-2 comprises at most 2 mismatches when optimally aligned with MERS and/or SARS viral genomes. In some embodiments, the at least one heterologous RNA polynucleotide complementary to the viral genomes, viral genes, or transcripts of the viral genomes and viral genes of SARS-COV-2 comprises at most 1 mismatches when optimally aligned with MERS and/or SARS viral genomes. In some embodiments, the at least one heterologous RNA polynucleotide complementary to the viral genomes, viral genes, or transcripts of the viral genomes and viral genes of SARS-COV-2 comprises no mismatch when optimally aligned with MERS and/or SARS viral genomes. In some embodiments, the mismatches can be insertions, deletions, synonymous mutations, non-synonymous mutations, or combinations thereof.

[0308] In some embodiments, the at least one heterologous RNA polynucleotide can be complementary and bind to the viral genomes, viral genes, or viral gene segments, or transcripts of the viral genomes and viral genes and viral gene segments as described herein. In some embodiments, the at least one heterologous RNA polynucleotide can be complementary and bind to viral genomes, viral genes, or transcripts of the viral genomes and viral genes of influenza virus. In some embodiments, the at least one heterologous RNA polynucleotide can be complementary and bind to viral genomes, viral genes, or transcripts of the viral genomes and viral genes of an influenza virus, such as influenza A, influenza B, influenza C, and influenza D. In some embodiments, the at least one heterologous RNA polynucleotide can be complementary and bind to viral genomes, viral genes, or transcripts of the viral genomes and viral genes of influenza A. Examples of an influenza can include, but are not limited to, influenza A types H1, H3, H5, H7, and H9 viruses. In some embodiments, the at least one heterologous RNA polynucleotide can be complementary and bind to viral genomes, viral genes, or transcripts of the viral genomes and viral genes can be selected from any strain of Column 1 of Table 6.

[0309] In some embodiments, the at least one heterologous RNA polynucleotide comprising a nucleic acid sequence of any one SEQ ID NOs: 13601-13606 targets an endogenous gene of the cell being infected by any one of strain of the virus described herein. In some embodiments, the endogenous gene is a member of the peptidase family M1 such as aminopeptidase N (ANPEP), aminopeptidase A, leukotriene A4 hydrolase, Ape2 aminopeptidase, Aap1′ aminopeptidase, pyroglutamyl-peptidase II, cytosol alanyl aminopeptidase, cystinyl aminopeptidase, aminopeptidase G, aminopeptidase B, aminopeptidase Ey, endoplasmic reticulum aminopeptidase 1, tricom interacting factor F2, tricorn interacting factor F3, arginyl aminopeptidase-like 1, ERAP2 aminopeptidase, aminopeptidase, aminopeptidase O, or Tata binding protein associated factor. In some embodiments, the endogenous gene targeted by the heterologous RNA polynucleotide is ANPEP. In some embodiments, the endogenous gene is a member of the minor histocompatibility antigen family such as AKAP13, APOBEC3B, ARHGDIB, BCAT2, BCL2A1, CD19, CENPM, CTSH, C19orf48, DDX3Y, DPH1, EB13, ERAP1, ERBB2, GEMIN4, HEATR1, ARHGAP45, HMHB1, HMSD, KDM5D, PUM3, RESF1, LY75, MR1, MTHFD1, MYO1G, NUP133, PDCD11, PI4K2B. PKN3, PRCP, PTK2B, P2RX5, RPS4Y1, SLC1A5, SLC19A1, SON, SP110, SSR1, SWAP70, TMSB4Y, TOR3A, TRIM22, TRIM42, TRIP10, TYMP, UGT2B17, USP9Y, UTY, WNK1, or ZNF419. In some embodiments, the endogenous gene targeted by the heterologous RNA polynucleotide is MTHFD1. In some embodiments, the endogenous gene is a member of the type II transmembrane serine protease family such as HAT/DESC subfamily: HAT, DESC1, TMPRSS11A, HAT-like 2, HAT-like 3, HAT-like 4, HAT-like 5: Hepsin/TMPRSS subfamily: Hepsin, TMPRSS2, TMPRSS3, TMPRSS4, MSPL, Spinesin, Enteropeptidase; Matriptase subfamily: Matriptase, Matriptase-2, Matripase-3, Polyserease-1; and Corin subfamily Corin. In some embodiments, the endogenous gene targeted by the heterologous RNA polynucleotide is TMPRSS2.

[0310] In some embodiments, the at least one heterologous RNA polynucleotide comprising a nucleic acid sequence of any one of SEQ ID NOs: 13607-13649 or 13701-13729 can target the RdRP, N-protein, or the viral genome of any one strain of the coronavirus described herein. In some embodiments, a combination of the at least one heterologous RNA polynucleotide comprising a nucleic acid sequence of any one of SEQ ID NOs: 13651-13664 or 13671-13684 can target any one strain of the virus described herein. In some embodiments, a combination of the at least one heterologous RNA polynucleotide comprising a nucleic acid sequence of any one of SEQ ID NOs: 13651-13664 or 13671-13684 can target viral genome of at least about 500, 1000, 5000, 10000, 15000, 20000, 21000, 22000, 23000, 24000, 25000, 30000, or more strains of virus. of any one of the strain of the virus described herein. In some embodiments, a combination of the at least one heterologous RNA polynucleotide comprising a nucleic acid sequence of any one of SEQ ID NOs: 13651-13664 or 13671-13684 can target viral genome of at least about 500, 1000, 5000, 10000, 15000, 20000, 21000, 22000, 23000, 24000, 25000, 30000, or more strains of virus. of any one of the strain of the RNA virus described herein. Non-limiting examples of the RNA virus include RNA virus families of Coronaviridae, Pneumoviridae, Paramyxoviridae, Caliciviridae, Hepeviridae, Picomaviridae, Filoviridae, Flaviviridae, Rhabdoviridae, or Togaviridae.

[0311] In some embodiments, the systems and methods described herein comprise complexing the at least one heterologous RNA polynucleotide with the gene regulating moiety. In some embodiments, the systems and methods described herein comprise complexing at least two different heterologous RNA polynucleotides with the gene regulating moiety. In some embodiments, the systems and methods described herein comprise complexing at least three different heterologous RNA polynucleotides with the gene regulating moiety. In some embodiments, the systems and methods described herein comprise complexing at least four different heterologous RNA polynucleotides with the gene regulating moiety. In some embodiments, the systems and methods described herein comprise complexing at least five different heterologous RNA polynucleotides with the gene regulating moiety. In some embodiments, the systems and methods described herein comprise complexing at least six different heterologous RNA polynucleotides with the gene regulating moiety.

[0312] In some embodiments, the systems and methods described herein comprise complexing at most one heterologous RNA polynucleotide with the gene regulating moiety. In some embodiments, the systems and methods described herein comprise complexing at most two different heterologous RNA polynucleotides with the gene regulating moiety. In some embodiments, the systems and methods described herein comprise complexing at most three different heterologous RNA polynucleotides with the gene regulating moiety. In some embodiments, the systems and methods described herein comprise complexing at most four different heterologous RNA polynucleotides with the gene regulating moiety. In some embodiments, the systems and methods described herein comprise complexing at most five different heterologous RNA polynucleotides with the gene regulating moiety. In some embodiments, the systems and methods described herein comprise complexing at most six different heterologous RNA polynucleotides with the gene regulating moiety.

[0313] In some embodiments, the systems and methods described herein comprise complexing the one heterologous RNA polynucleotide with the gene regulating moiety. In some embodiments, the systems and methods described herein comprise complexing two different heterologous RNA polynucleotides with the gene regulating moiety. In some embodiments, the systems and methods described herein comprise complexing three different heterologous RNA polynucleotides with the gene regulating moiety. In some embodiments, the systems and methods described herein comprise complexing four different heterologous RNA polynucleotides with the gene regulating moiety. In some embodiments, the systems and methods described herein comprise complexing five different heterologous RNA polynucleotides with the gene regulating moiety. In some embodiments, the systems and methods described herein comprise complexing six different heterologous RNA polynucleotides with the gene regulating moiety.

[0314] In some embodiments, the systems and methods described herein comprise complexing the at least one heterologous RNA polynucleotide with the gene regulating moiety. In some embodiments, the systems and methods described herein comprise complexing a plurality of the heterologous RNA polynucleotides with the gene regulating moiety. In some cases, the plurality of the heterologous RNA polynucleotides comprises one, two, three, four, five, six, seven, eight, nine, ten, 20, 30, 50, 100, or more different heterologous RNA polynucleotides. In some embodiments, the plurality of the heterologous RNA polynucleotides collectively bind to at least 50%, 60%, 70%, 80%, 90%, 95%, 99%, or more of different types of coronavirus selected from the group consisting of alphacoronavirus, betacoronavirus, deltacoronavirus, and gammacoronavirus.

[0315] The term “collectively bind” as used herein generally refers to binding of a plurality of polynucleotides (e.g., crRNAs as disclosed herein) to a pool (or a set) of targets as a group. The pool of targets can be a pool of different viral genomes, different viral genes, or transcripts of the different viral genomes or viral genes. For example, the pool of targets can be a set of different strains of the coronavirus. A number or proportion of the pool of targets that is collectively bound (or collectively targeted) by the plurality of polynucleotides can be approximately equal to the number of proportion of individual targets of the pool of targets that is bound (or targeted) by at least one of the plurality of polynucleotides. For example, a plurality of polynucleotides can collectively bind 50% of a pool of targets when 50% of the pool of targets are bound (or targeted) by one or more polynucleotide of the plurality of polynucleotides. In some cases, an individual polynucleotide of the plurality of polynucleotides can be configured to bind only one of the pool of targets. Alternatively, an individual polynucleotide of the plurality of polynucleotides can be configured to bind to a plurality of targets of the pool of targets. A non-limiting example of the pool of targets can be a pool of genomes (or fragments thereof) of different viruses, e.g., different coronavirus types and/or strains. The terms “binds” and “targets” can be used interchangeably herein.

[0316] D. crRNA

[0317] Described herein, in some embodiments, are heterologous RNA polynucleotides comprising crRNAs. In some embodiments, the crRNA comprises targeting sequence that is complementary to the target viral genomes, viral genes, or transcripts of the viral genomes or viral genes as described herein.

[0318] In some embodiments, the crRNA comprises 5 nt to 100 nt. In some embodiments, the crRNA comprises 5 nt to 6 nt, 5 nt to 7 nt, 5 nt to 8 nt, 5 nt to 9 nt, 5 nt to 10 nt, 5 nt to 15 nt, 5 nt to 20 nt, 5 nt to 25 nt, 5 nt to 50 nt, 5 nt to 100 nt, 6 nt to 7 nt, 6 nt to 8 nt, 6 nt to 9 nt, 6 nt to 10 nt, 6 nt to 15 nt, 6 nt to 20 nt, 6 nt to 25 nt, 6 nt to 50 nt, 6 nt to 100 nt, 7 nt to 8 nt, 7 nt to 9 nt, 7 nt to 10 nt, 7 nt to 15 nt, 7 nt to 20 nt, 7 nt to 25 nt, 7 nt to 50 nt, 7 nt to 100 nt, 8 nt to 9 nt, 8 nt to 10 nt, 8 nt to 15 nt, 8 nt to 20 nt, 8 nt to 25 nt, 8 nt to 50 nt, 8 nt to 100 nt, 9 nt to 10 nt, 9 nt to 15 nt, 9 nt to 20 nt, 9 nt to 25 nt, 9 nt to 50 nt, 9 nt to 100 nt, 10 nt to 15 nt, 10 nt to 20 nt, 10 nt to 25 nt, 10 nt to 50 nt, 0 nt to 100 nt, 15 nt to 20 nt, 5 nt to 25 nt, 15 nt to 50 nt, 15 nt to 100 nt, 20 nt to 25 nt, 20 nt to 50 nt, 20 nt to 100 nt, 25 nt to 50 nt, 25 nt to 100 nt, or 50 nt to 100 nt. In some embodiments, the crRNA comprises 5 nt, 6 nt, 7 nt, 8 nt, 9 nt, 10 nt, 15 nt, 20 nt, 25 nt, 50 nt, or 100 nt. In some embodiments, the crRNA comprises at least 5 nt, 6 nt, 7 nt, 8 nt, 9 nt, 10 nt, 15 nt, 20 nt, 25 nt, or 50 nt. In some embodiments, the crRNA comprises at most 6 nt, 7 nt, 8 nt, 9 nt, 10 nt, 15 nt, 20 nt, 25 nt, 50 nt, or 100 nt. In some embodiments, the crRNA comprises at least 5 nt to 100 nt. In some embodiments, the crRNA comprises at least 5 nt to 6 nt, 5 nt to 7 nt, 5 nt to 8 nt, 5 nt to 9 nt, 5 nt to 10 nt, 5 nt to 15 nt, 5 nt to 20 nt, 5 nt to 25 nt, 5 nt to 50 nt, 5 nt to 100 nt, 6 nt to 7 nt, 6 nt to 8 nt, 6 nt to 9 nt, 6 nt to 10 nt, 6 nt to 15 nt, 6 nt to 20 nt, 6 nt to 25 nt, 6 nt to 50 nt, 6 nt to 100 nt, 7 nt to 8 nt, 7 nt to 9 nt, 7 nt to 10 nt, 7 nt to 15 nt, 7 nt to 20 nt, 7 nt to 25 nt, 7 nt to 50 nt, 7 nt to 100 nt, 8 nt to 9 nt, 8 nt to 10 nt, 8 nt to 15 nt, 8 nt to 20 nt, 8 nt to 25 nt, 8 nt to 50 nt, 8 nt to 100 nt, 9 nt to 10 nt, 9 nt to 15 nt, 9 nt to 20 nt, 9 nt to 25 nt, 9 nt to 50 nt, 9 nt to 100 nt, 10 nt to 15 nt, 10 nt to 20 nt, 10 nt to 25 nt, 10 nt to 50 nt, 10 nt to 100 nt, 15 nt to 20 nt, 15 nt to 25 nt, 15 nt to 50 nt, 15 nt to 100 nt, 20 nt to 25 nt, 20 nt to 50 nt, 20 nt to 100 nt, 25 nt to 50 nt, 25 nt to 100 nt, or 50 nt to 100 nt. In some embodiments, the crRNA comprises at least 5 nt, 6 nt, 7 nt, 8 nt, 9 nt, 10 nt, 15 nt, 20 nt, 25 nt, 50 nt, or 100 nt. In some embodiments, the crRNA comprises at least at least 5 nt, 6 nt, 7 nt, 8 nt, 9 nt, 10 nt, 15 nt, 20 nt, 25 nt, or 50 nt. In some embodiments, the crRNA comprises at least at most 6 nt, 7 nt, 8 nt, 9 nt, 10 nt, 15 nt, 20 nt, 25 nt, 50 nt, or 100 nt. In some embodiments, the crRNA comprises at most 5 nt to 100 nt. In some embodiments, the crRNA comprises at most 5 nt to 6 nt, 5 nt to 7 nt, 5 nt to 8 nt, 5 nt to 9 nt, 5 nt to 10 nt, 5 nt to 15 nt, 5 nt to 20 nt, 5 nt to 25 nt, 5 nt to 50 nt, 5 nt to 100 nt, 6 nt to 7 nt, 6 nt to 8 nt, 6 nt to 9 nt, 6 nt to 10 nt, 6 nt to 15 nt, 6 nt to 20 nt, 6 nt to 25 nt, 6 nt to 50 nt, 6 nt to 100 nt, 7 nt to 8 nt, 7 nt to 9 nt, 7 nt to 10 nt, 7 nt to 15 nt, 7 nt to 20 nt, 7 nt to 25 nt, 7 nt to 50 nt, 7 nt to 100 nt, 8 nt to 9 nt, 8 nt to 10 nt, 8 nt to 15 nt, 8 nt to 20 nt, 8 nt to 25 nt, 8 nt to 50 nt, 8 nt to 100 nt, 9 nt to 10 nt, 9 nt to 15 nt, 9 nt to 20 nt, 9 nt to 25 nt, 9 nt to 50 nt, 9 nt to 100 nt, 10 nt to 15 nt, 10 nt to 20 nt, 10 nt to 25 nt, 10 nt to 50 nt, 10 nt to 100 nt, 15 nt to 20 nt, 15 nt to 25 nt t nt to 50 nt, 15 nt to 100 nt, 20 nt to 25 nt, 20 nt to 50 nt, 20 nt to 100 nt, 25 nt to 50 nt, 25 nt to 100 nt, or 50 nt to 100 nt. In some embodiments, the crRNA comprises at most 5 nt, 6 nt, 7 nt, 8 nt, 9 nt, 10 nt, 15 nt, 20 nt, 25 nt, 50 nt, or 100 nt. In some embodiments, the crRNA comprises at most at least 5 nt, 6 nt, 7 nt, 8 nt, 9 nt, 10 nt, 15 nt, 20 nt, 25 nt, or 50 nt. In some embodiments, the crRNA comprises at most at most 6 nt, 7 nt, 8 nt, 9 nt, 10 nt, 15 nt, 20 nt, 25 nt, 50 nt, or 100 nt.

[0319] In some embodiments, the crRNA complements and binds to any one of the reference viral genome as indicated by the GenBank Access ID numbers. In some embodiments, the crRNA shares at least 50%, 60%, 70%, 80%, 90%, 95%, or 99% of a portion of any one of the reference viral genome as indicated by the GenBank Access ID numbers.

[0320] In some embodiments, the crRNA complements and binds to the viral coding regions, viral genes, or viral open reading frames of SARS-COV-2. In some embodiments, the crRNA shares at least 50%, 60%, 70%, 80%, 90%, 95%, or 99% of a portion of the viral coding regions, viral genes, or viral open reading frames of SARS-COV-2. Exemplary COVI-19 genes that can be targeted and bound by the crRNA include orf1a, orf1ab, S (spike), 3a, 3b, E (envelope protein), M (matrix protein), p6, 7a, 7b, 8b, 9b, N (nucleocapsid), orf14, nsp1 (leader protein), nsp2, nsp3, nsp4, nsp5 (3C-like proteinase), nsp6, nsp7, nsp8, nsp9, nsp10 (growth-factor-like protein), nsp12 (RNA-dependent RNA polymerase, or RdRP), nsp13 (RNA 5′-triphosphatase), nsp14 (3′-to-5′ exonuclease), nsp15 (endoRNAse), and nsp16 (2′-O-ribose methyltransferase). In some cases, the crRNA described herein can target and bind to a portion of the RdRP or a portion of the N protein.

[0321] As disclosed herein, a plurality of types of coronavirus can be selected from the group consisting of alphacoronavirus, betacoronavirus, deltacoronavirus, and gammacoronavirus. The plurality of types of coronavirus can be a collection of at least 100, 200, 300, 400, 500, 1000, 1500, 2000, 2500, 3000, or more different strains of coronavirus.

[0322] In some embodiments, a single crRNA can bind to (or bind to genomes or gene fragments thereof from) at least 20%, 25%, 30%, 35%, 40%, 45%, 50%, 60%, 70%, 80%, 90%, 95%, 99%, or more of the different types of coronavirus selected from the group consisting of alphacoronavirus, betacoronavirus, deltacoronavirus, and gammacoronavirus. In preferred embodiments, the single cRNA can collectively bind to at least 30%, 31%, 32%, 33%, 34%, 35%, 36%, 37%, 38%, 39%, 40%, 45%, 50%, or more of a collection of at least 1000, 2000, 3000, or more genomes from the different types of coronavirus.

[0323] In some embodiments, at least 2, 3, 4, 5, 6, 7, 8, 9, 10, 20, 25, 30, 40, 50, or more crRNA can collectively bind to (or collectively bind to genomes or gene fragments thereof from) at least 40%, 45%, 50%, 55%, 60%, 65%, 70%, 75%, 80%, 85%, 90%, 95%, 99%, or more of different types of coronavirus selected from the group consisting of alphacoronavirus, betacoronavirus, deltacoronavirus, and gammacoronavirus. In some embodiments, at most 50, 40, 30, 25, 20, 10, 9, 8, 7, 6, 5, 4, 3, or 2 crRNA can collectively bind to (or collectively bind to genomes or gene fragments thereof from) at least 40%, 45%, 50%, 55%, 60%, 65%, 70%, 75%, 80%, 85%, 90%, 95%, 99%, or more of different types of coronavirus selected from the group consisting of alphacoronavirus, betacoronavirus, deltacoronavirus, and gammacoronavirus. In some embodiments, 2, 3, 4, 5, 6, 7, 8, 9, 10, 20, 25, 30, 40, 50, or more crRNA can collectively bind to (or collectively bind to genomes or gene fragments thereof from) at least 40%, 45%, 50%, 55%, 60%, 65%, 70%, 75%, 80%, 85%, 90%, 95%, 99%, or more of different types of coronavirus selected from the group consisting of alphacoronavirus, betacoronavirus, deltacoronavirus, and gammacoronavirus.

[0324] In some embodiments, at most two crRNAs (e.g., 2 crRNAs) can collectively bind to at least 40%, 45%, 50%, 60%, 70%, 80%, 90%, 95%, 99%, or more of different types of coronavirus selected from the group consisting of alphacoronavirus, betacoronavirus, deltacoronavirus, and gammacoronavirus. In preferred embodiments, at most two crRNAs can collectively bind to at least 45% or more of a collection of at least 1000, 2000, 3000, or more genomes from the different types of coronavirus.

[0325] In some embodiments, at most three crRNAs (e.g., 3 crRNAs) can collectively bind to at least 50%, 55%, 60%, 70%, 80%, 90%, 95%, 99%, or more of different types of coronavirus selected from the group consisting of alphacoronavirus, betacoronavirus, deltacoronavirus, and gammacoronavirus. In preferred embodiments, at most three crRNAs can collectively bind to at least 60% or more of a collection of at least 1000, 2000, 3000, or more genomes from the different types of coronavirus.

[0326] In some embodiments, at most four crRNAs (e.g., 4 crRNAs) can collectively bind to at least 70%, 75%, 80%, 85%, 90%, 95%, 99%, or more of different types of coronavirus selected from the group consisting of alphacoronavirus, betacoronavirus, deltacoronavirus, and gammacoronavirus. In preferred embodiments, at most four crRNAs can collectively bind to at least 80% or more of a collection of at least 1000, 2000, 3000, or more genomes from the different types of coronavirus.

[0327] In some embodiments, at most five crRNAs (e.g., 5 crRNAs) can collectively bind to at least 80%, 81%, 82%, 83%, 84%, 85%, 86%, 87%, 88%, 89%, 90%, 95%, 99%, or more of different types of coronavirus selected from the group consisting of alphacoronavirus, betacoronavirus, deltacoronavirus, and gammacoronavirus. In preferred embodiments, at most five crRNAs can collectively bind to at least 85% or more of a collection of at least 1000, 2000, 3000, or more genomes from the different types of coronavirus.

[0328] In some embodiments, at most six crRNAs (e.g., 6 crRNAs) can collectively bind to at least 90%, 91%, 92%, 93%, 94%, 95%, 96%, 97%, 98%, 99%, or more of different types of coronavirus selected from the group consisting of alphacoronavirus, betacoronavirus, deltacoronavirus, and gammacoronavirus. In preferred embodiments, at most six crRNAs can collectively bind to at least 90% or more of a collection of at least 1000, 2000, 3000, or more genomes from the different types of coronavirus.

[0329] In some embodiments, at most ten crRNAs (e.g., 10 crRNAs) can collectively bind to at least 92%, 93%, 94%, 95%, 96%, 97%, 98%, 99%, or more of different types of coronavirus selected from the group consisting of alphacoronavirus, betacoronavirus, deltacoronavirus, and gammacoronavirus. In preferred embodiments, at most ten crRNAs can collectively bind to at least 95% or more of a collection of at least 1000, 2000, 3000, or more genomes from the different types of coronavirus.

[0330] In some embodiments, at most fourteen crRNAs (e.g., 14 crRNAs SEQ ID NOs: 13651-13664) can collectively bind to at least 95%, 96%, 97%, 98%, 99%, 99.5%, or more of different types of coronavirus selected from the group consisting of alphacoronavirus, betacoronavirus, deltacoronavirus, and gammacoronavirus. In preferred embodiments, at most fourteen crRNAs can collectively bind to at least 99% or more of a collection of at least 1000, 2000, 3000, or more genomes from the different types of coronavirus.

[0331] In some embodiments, at most twenty-two (e.g., 22 crRNAs) can collectively bind to at least 99.9% (e.g., 100%) of different types of coronavirus selected from the group consisting of alphacoronavirus, betacoronavirus, deltacoronavirus, and gammacoronavirus. In preferred embodiments, at most twenty-two crRNAs can collectively bind to at least 99.9% or more of a collection of at least 1000, 2000, 3000, or more genomes from the different types of coronavirus.

[0332] Table 1 and Table 5 illustrate exemplary crRNAs, where any combinations of 2, 4, 6, 8, 10, 15, or 20 of the cRNAs can target at least 90% of different types of coronavirus selected from the group consisting of alphacoronavirus, betacoronavirus, deltacoronavirus, and gammacoronavirus.

[0333] In some embodiments, the crRNA as described in the present disclosure can comprise any sequence in SEQ ID NOs: 1-3203, 4001-7203, and 8001-11203.

[0334] In some embodiments, the crRNA as described in the present disclosure can comprise at least about 50%, 55%, 60%, 65%, 70%, 75%, 80%, 81%, 82%, 83%, 84%, 85%, 86%, 87%, 88%, 89%, 90%, 91%, 92%, 93%, 94%, 95%, 96%, 97%, 98%, 99%, or more sequence identity to a sequence selected from SEQ ID NOs: 13301-13348, 13401-13448, and 13501-13548.

[0335] The at least one crRNA as described in the present disclosure can comprise at most about 100%, 99%, 98%, 97%, 96%, 95%, 94%, 93%, 92%, 91%, 90%, 89%, 88%, 87%, 86%, 85%, 84%, 83%, 82%, 81%, 80%, 75%, 70%, 65%, 60%, 55%, 50%, or less sequence identity to a sequence selected from SEQ ID NOs: 13301-13348, 13401-13448, and 13501-13548.

[0336] In some cases, the at least one crRNA can be configured to affect at least about 30%, 35%, 40%, 45%, 50%, 55%, 60%, 65%, 70%, 75%, 80%, 81%, 82%, 83%, 84%, 85%, 86%, 87%, 88%, 89%, 90%, 91%, 92%, 93%, 94%, 95%, 96%, 97%, 98%, 99%, or more reduction in expression of one or more target viral genes encoding one or more viral proteins (e.g., PB2, PB2, PB1-F2, PA, HA, NP, NA, M1, M2, NS1, and/or NEP/NS2) or a fragment thereof. In some cases, the least one heterologous RNA polynucleotide can be configured to effect at most about 100%, 99%, 98%, 97%, 96%, 95%, 94%, 93%, 92%, 91%, 90%, 89%, 88%, 87%, 86%, 85%, 84%, 83%, 82%, 81%, 80%, 75%, 70%, 65%, 60%, 55%, 50%, 45%, 40%, 35%, 30%, or less in expression of one or more target viral genes encoding one or more viral proteins (e.g., PB2, PB2, PB1-F2, PA, HA, NP, NA, M1, M2, NS1, and/or NEP/NS2) or a fragment thereof.

[0337] In some embodiments, the at least one crRNA as described in the present disclosure can comprise at least about 50%, 55%, 60%, 65%, 70%, 75%, 80%, 81%, 82%, 83%, 84%, 85%, 86%, 87%, 88%, 89%, 90%, 91%, 92%, 93%, 94%, 95%, 96%, 97%, 98%, 99%, or more sequence identity to a sequence selected from SEQ ID NOs: 13601-13606, 13607-13649, 13651-13664, 13671-13684, and 13701-13729.

[0338] The at least one crRNA as described in the present disclosure can comprise at most about 100%, 99%, 98%, 97%, 96%, 95%, 94%, 93%, 92%, 91%, 90%, 89%, 88%, 87%, 86%, 85%, 84%, 83%, 82%, 81%, 80%, 75%, 70%, 65%, 60%, 55%, 50%, or less sequence identity to a sequence selected from SEQ ID NOs: 13601-13606, 13607-13649, 13651-13664, 13671-13684, and 13701-13729.

[0339] In some embodiments, the at least one crRNA comprising a nucleic acid sequence of any one SEQ ID NOs: 13601-13606 targets an endogenous gene of the cell being infected by any one of strain of the virus described herein. In some embodiments, the endogenous gene is a member of the peptidase family M1 such as aminopeptidase N (ANPEP), aminopeptidase A, leukotriene A4 hydrolase, Ape2 aminopeptidase, Aap1′ aminopeptidase, pyroglutamyl-peptidase II, cytosol alanyl aminopeptidase, cystinyl aminopeptidase, aminopeptidase G, aminopeptidase B, aminopeptidase Ey, endoplasmic reticulum aminopeptidase 1, tricorn interacting factor F2, tricom interacting factor F3, arginyl aminopeptidase-like 1, ERAP2 aminopeptidase, aminopeptidase, aminopeptidase O, or Tata binding protein associated factor. In some embodiments, the endogenous gene targeted by the heterologous RNA polynucleotide is ANPEP. In some embodiments, the endogenous gene is a member of the minor histocompatibility antigen family such as AKAP13, APOBEC3B, ARHGDIB, BCAT2, BCL2A1, CD19, CENPM, CTSH, C19orf48, DDX3Y, DPH1, EBI3, ERAP1, ERBB2, GEMIN4, HEATR1, ARHGAP45, HMHB1, HMSD, KDM5D, PUM3, RESF1, LY75, MR1, MTHFD1, MYO1G, NUP133, PDCD11, PI4K2B, PKN3, PRCP, PTK2B, P2RX5, RPS4Y1, SLC1A5, SLC19A1, SON, SP110, SSR1, SWAP70, TMSB4Y, TOR3A, TRIM22, TRIM42, TRIP10, TYMP, UGT2B17, USP9Y, UTY, WNK1, or ZNF419. In some embodiments, the endogenous gene targeted by the heterologous RNA polynucleotide is MTHFD1. In some embodiments, the endogenous gene is a member of the type II transmembrane serine protease family such as HAT/DESC subfamily: HAT, DESC1, TMPRSS11A, HAT-like 2, HAT-like 3, HAT-like 4, HAT-like 5; Hepsin/TMPRSS subfamily: Hepsin, TMPRSS2, TMPRSS3, TMPRSS4, MSPL, Spinesin, Enteropeptidase; Matriptase subfamily: Matriptase, Matriptase-2, Matripase-3, Polyserease-1; and Corin subfamily Corin. In some embodiments, the endogenous gene targeted by the heterologous RNA polynucleotide is TMPRSS2.

[0340] In some embodiments, the at least one crRNA comprising a nucleic acid sequence of any one of SEQ ID NOs: 13607-13649 or 13701-13729 can target the RdRP, N-protein, or the viral genome of any one strain of the coronavirus described herein. In some embodiments, a combination of the at least one crRNA comprising a nucleic acid sequence of any one of SEQ ID NOs: 13651-13664 or 13671-13684 can target any one strain of the virus described herein. In some embodiments, a combination of the at least one crRNA comprising a nucleic acid sequence of any one of SEQ ID NOs: 13651-13664 or 13671-13684 can target viral genome of at least about 500, 1000, 5000, 10000, 15000, 20000, 21000, 22000, 23000, 24000, 25000, 30000, or more strains of virus. of any one of the strain of the virus described herein. In some embodiments, a combination of the at least one crRNA comprising a nucleic acid sequence of any one of SEQ ID NOs: 13651-13664 or 13671-13684 can target viral genome of at least about 500, 1000, 5000, 10000, 15000, 20000, 21000, 22000, 23000, 24000, 25000, 30000, or more strains of virus. of any one of the strain of the RNA virus described herein. Non-limiting examples of the RNA virus include RNA virus families of Coronaviridae, Pneumoviridae. Paramyxoviridae, Caliciviridae, Hepeviridae, Picomaviridae, Filoviridae, Flaviviridae, Rhabdoviridae, or Togaviridae.

[0341] In some embodiments, one or more strains of a virus as disclosed herein can be one or more reference strains of a reference virus. In some cases, a plurality of strains of a plurality of virus families can be a plurality of references strains of a plurality of reference virus families.

[0342] E. Delivery

[0343] Described herein, in some embodiments, are methods of delivering the systems described herein into a cell, thus reducing viral expression by contacting the cell with the systems. In some embodiments, the cell is a somatic cell. In some embodiments, the cell is a stem cell or a progenitor cell. In some embodiments, the cell is a mesenchymal stem or progenitor cell. In some embodiments, the cell is a hematopoietic stem or progenitor cell. In some embodiments, the cell is a muscle cell, a skin cell, a blood cell, or an immune cell. Other exemplary cells can include lymphoid cells, such as B cell, T cell (Cytotoxic T cell, Natural Killer T cell, Regulatory T cell, T helper cell), Natural killer cell, cytokine induced killer (CIK) cells; myeloid cells, such as granulocytes (Basophil granulocyte, Eosinophil granulocyte, Neutrophil granulocyte/Hypersegmented neutrophil), Monocyte/Macrophage, Red blood cell (Reticulocyte), Mast cell, Thrombocyte/Megakaryocyte, Dendritic cell; cells from the endocrine system, including thyroid (Thyroid epithelial cell, Parafollicular cell), parathyroid (Parathyroid chief cell, Oxyphil cell), adrenal (Chromaffin cell), pineal (Pinealocyte) cells; cells of the nervous system, including glial cells (Astrocyte, Microglia), Magnocellular neurosecretory cell, Stellate cell, Boettcher cell, and pituitary (Gonadotrope, Corticotrope, Thyrotrope, Somatotrope, Lactotroph); cells of the Respiratory system, including Pneumocyte (Type I pneumocyte, Type II pneumocyte), Clara cell, Goblet cell, Dust cell; cells of the circulatory system, including Myocardiocyte, Pericyte; cells of the digestive system, including stomach (Gastric chief cell, Parietal cell), Goblet cell, Paneth cell, G cells, D cells, ECL cells, I cells, K cells, S cells; enteroendocrine cells, including enterochromaffm cell, APUD cell, liver (Hepatocyte, Kupffer cell), Cartilage/bone/muscle: bone cells, including Osteoblast, Osteocyte, Osteoclast, teeth (Cementoblast, Ameloblast); cartilage cells, including Chondroblast, Chondrocyte; skin cells, including Trichocyte, Keratinocyte, Melanocyte (Nevus cell); muscle cells, including Myocyte; urinary system cells, including Podocyte, Juxtaglomerular cell, Intraglomerular mesangial cell/Extraglomerular mesangial cell, Kidney proximal tubule brush border cell, Macula densa cell; reproductive system cells, including Spermatozoon, Sertoli cell, Leydig cell, Ovum; and other cells, including Adipocyte, Fibroblast, Tendon cell, Epidermal keratinocyte (differentiating epidermal cell), Epidermal basal cell (stem cell), Keratinocyte of fingernails and toenails, Nail bed basal cell (stem cell), Medullary hair shaft cell, Cortical hair shaft cell, Cuticular hair shaft cell, Cuticular hair root sheath cell, Hair root sheath cell of Huxley's layer, Hair root sheath cell of Henle's layer, External hair root sheath cell, Hair matrix cell (stem cell), Wet stratified barrier epithelial cells, Surface epithelial cell of stratified squamous epithelium of cornea, tongue, oral cavity, esophagus, anal canal, distal urethra and vagina, basal cell (stem cell) of epithelia of cornea, tongue, oral cavity, esophagus, anal canal, distal urethra and vagina, Urinary epithelium cell (lining urinary bladder and urinary ducts), Exocrine secretory epithelial cells. Salivary gland mucous cell (polysaccharide-rich secretion), Salivary gland serous cell (glycoprotein enzyme-rich secretion), Von Ebner's gland cell in tongue (washes taste buds), Mammary gland cell (milk secretion), Lacrimal gland cell (tear secretion), Ceruminous gland cell in ear (wax secretion), Eccrine sweat gland dark cell (glycoprotein secretion). Eccrine sweat gland clear cell (small molecule secretion). Apocrine sweat gland cell (odoriferous secretion, sex-hormone sensitive), Gland of Moll cell in eyelid (specialized sweat gland), Sebaceous gland cell (lipid-rich sebum secretion), Bowman's gland cell in nose (washes olfactory epithelium), Brunner's gland cell in duodenum (enzymes and alkaline mucus), Seminal vesicle cell (secretes seminal fluid components, including fructose for swimming sperm), Prostate gland cell (secretes seminal fluid components), Bulbourethral gland cell (mucus secretion), Bartholin's gland cell (vaginal lubricant secretion), Gland of Littre cell (mucus secretion), Uterus endometrium cell (carbohydrate secretion), Isolated goblet cell of respiratory and digestive tracts (mucus secretion), Stomach lining mucous cell (mucus secretion), Gastric gland zymogenic cell (pepsinogen secretion), Gastric gland oxyntic cell (hydrochloric acid secretion), Pancreatic acinar cell (bicarbonate and digestive enzyme secretion), Paneth cell of small intestine (lysozyme secretion), Type II pneumocyte of lung (surfactant secretion), Clara cell of lung, Hormone secreting cells, Anterior pituitary cells, Somatotropes, Lactotropes, Thyrotropes, Gonadotropes, Corticotropes, Intermediate pituitary cell, Magnocellular neurosecretory cells, Gut and respiratory tract cells, Thyroid gland cells, thyroid epithelial cell, parafollicular cell, Parathyroid gland cells, Parathyroid chief cell. Oxyphil cell, Adrenal gland cells, chromaffin cells, Ley dig cell of testes. Theca interna cell of ovarian follicle, Corpus luteum cell of ruptured ovarian follicle, Granulosa lutein cells, Theca lutein cells, Juxtaglomerular cell (renin secretion), Macula densa cell of kidney, Metabolism and storage cells, Barrier function cells (Lung, Gut, Exocrine Glands and Urogenital Tract), Kidney. Type I pneumocyte (lining air space of lung), Pancreatic duct cell (centroacinar cell), Nonstriated duct cell (of sweat gland, salivary gland, mammary gland, etc.), Duct cell (of seminal vesicle, prostate gland, etc.), Epithelial cells lining closed internal body cavities, Ciliated cells with propulsive function, Extracellular matrix secretion cells, Contractile cells; Skeletal muscle cells, stem cell, Heart muscle cells, Blood and immune system cells, Erythrocyte (red blood cell), Megakaryocyte (platelet precursor), Monocyte, Connective tissue macrophage (various types), Epidermal Langerhans cell, Osteoclast (in bone), Dendritic cell (in lymphoid tissues). Microglial cell (in central nervous system), Neutrophil granulocyte, Eosinophil granulocyte, Basophil granulocyte, Mast cell, Helper T cell, Suppressor T cell, Cytotoxic T cell, Natural Killer T cell. B cell, Natural killer cell, Reticulocyte. Stem cells and committed progenitors for the blood and immune system (various types). Pluripotent stem cells, Totipotent stem cells, Induced pluripotent stem cells, adult stem cells, Sensory transducer cells, Autonomic neuron cells, Sense organ and peripheral neuron supporting cells, Central nervous system neurons and glial cells, Lens cells, Pigment cells, Melanocyte, Retinal pigmented epithelial cell, Germ cells, Oogonium/Oocyte, Spermatid, Spermatocyte, Spermatogonium cell (stem cell for spermatocyte), Spermatozoon, Nurse cells, Ovanan follicle cell, Sertoli cell (in testis), Thymus epithelial cell, Interstitial cells, and Interstitial kidney cells.

[0344] In some embodiments, the gene regulating moiety and the heterologous RNA polynucleotide can be delivered into the cell. In some embodiments, polynucleotides encoding the gene regulating moiety and/or the heterologous RNA polynucleotide can be delivered into the cell via the use of expression vectors. In the context of an expression vector, the vector can be readily introduced into a host cell, e.g., mammalian, bacterial, yeast, or insect cell by any method in the art. For example, the expression vector can be transferred into a host cell by physical, chemical, or biological means.

[0345] Physical methods for introducing a polynucleotide into a host cell include calcium phosphate precipitation, lipofection, particle bombardment, microinjection, gene gun, electroporation, and the like. Methods for producing cells comprising vectors and/or exogenous nucleic acids are suitable for methods herein. One method for the introduction of a polynucleotide into a host cell is calcium phosphate transfection.

[0346] Biological methods for introducing a polynucleotide of interest into a host cell include the use of DNA and RNA vectors. Viral vectors, and especially retroviral vectors, have become the most widely used method for inserting genes into mammalian, e.g., human cells. Other viral vectors, in some embodiments, are derived from lentivirus, poxviruses, herpes simplex virus I, adenoviruses and adeno-associated viruses, and the like. Exemplary viral vectors include retroviral vectors, adenoviral vectors, adeno-associated viral vectors (AAVs), pox vectors, parvoviral vectors, baculovirus vectors, measles viral vectors, or herpes simplex virus vectors (HSVs). In some instances, the retroviral vectors include gamma-retroviral vectors such as vectors derived from the Moloney Murine Keukemia Virus (MoMLV, MMLV, MuLV, or MLV) or the Murine Steam cell Virus (MSCV) genome. In some instances, the retroviral vectors also include lentiviral vectors such as those derived from the human immunodeficiency virus (HIV) genome. In some instances, AAV vectors include AAV1, AAV2, AAV4, AAV5, AAV6, AAV7, AAV8, or AAV9 serotype. In some instances, viral vector is a chimeric viral vector, comprising viral portions from two or more viruses. In additional instances, the viral vector is a recombinant viral vector.

[0347] Chemical means for introducing a polynucleotide into a host cell include colloidal dispersion systems, such as macromolecule complexes, nanocapsules, microspheres, beads, and lipid-based systems including oil-in-water emulsions, micelles, mixed micelles, and liposomes. An exemplary colloidal system for use as a delivery vehicle in vitro and in vivo is a liposome (e.g., an artificial membrane vesicle). Other methods of state-of-the-art targeted delivery of nucleic acids are available, such as delivery of polynucleotides with targeted nanoparticles or other suitable sub-micron sized delivery system.

[0348] In the case where a non-viral delivery system is utilized, an exemplary delivery vehicle is a liposome. The use of lipid formulations is contemplated for the introduction of the nucleic acids into a host cell (in vitro, ex vivo or in vivo). In another aspect, the nucleic acid is associated with a lipid. The nucleic acid associated with a lipid, in some embodiments, is encapsulated in the aqueous interior of a liposome, interspersed within the lipid bilayer of a liposome, attached to a liposome via a linking molecule that is associated with both the liposome and the oligonucleotide, entrapped in a liposome, complexed with a liposome, dispersed in a solution containing a lipid, mixed with a lipid, combined with a lipid, contained as a suspension in a lipid, contained or complexed with a micelle, or otherwise associated with a lipid. Lipid, lipid/DNA or lipid/expression vector associated systems are not limited to any particular structure in solution. For example, in some embodiments, they are present in a bilayer structure, as micelles, or with a “collapsed” structure. Alternately, they are simply be interspersed in a solution, possibly forming aggregates that are not uniform in size or shape. Lipids are fatty substances which are, in some embodiments, naturally occurring or synthetic lipids. For example, lipids include the fatty droplets that naturally occur in the cytoplasm as well as the class of compounds which contain long-chain aliphatic hydrocarbons and their derivatives, such as fatty acids, alcohols, amines, amino alcohols, and aldehydes.

[0349] Lipids suitable for use are obtained from commercial sources. For example, in some embodiments, dimyristyl phosphatidylcholine (“DMPC”) is obtained from Sigma, St. Louis, Mo.: in some embodiments, dicetyl phosphate (“DCP”) is obtained from K & K Laboratories (Plainview, N.Y.); cholesterol (“Choi”), in some embodiments, is obtained from Calbiochem-Behring: dimyristyl phosphatidylglycerol (“DMPG”) and other lipids are often obtained from Avanti Polar Lipids. Inc. (Birmingham, Ala.). Stock solutions of lipids in chloroform or chloroform/methanol are often stored at about −20° C. Chloroform is used as the only solvent since it is more readily evaporated than methanol. “Liposome” is a generic term encompassing a variety of single and multilamellar lipid vehicles formed by the generation of enclosed lipid bilayers or aggregates. Liposomes are often characterized as having vesicular structures with a phospholipid bilayer membrane and an inner aqueous medium. Multilamellar liposomes have multiple lipid layers separated by aqueous medium. They form spontaneously when phospholipids are suspended in an excess of aqueous solution. The lipid components undergo self-rearrangement before the formation of closed structures and entrap water and dissolved solutes between the lipid bilayers. However, systems that have different structures in solution than the normal vesicular structure are also encompassed. For example, the lipids, in some embodiments, assume a micellar structure or merely exist as nonuniform aggregates of lipid molecules. Also contemplated are lipofectamine-nucleic acid complexes.

[0350] In some cases, the systems described herein can be packaged and delivered to the cell via extracellular vesicles. The extracellular vesicles can be any membrane-bound particles. In some embodiments, the extracellular vesicles can be any membrane-bound particles secreted by at least one cell. In some instances, the extracellular vesicles can be any membrane-bound particles synthesized in vitro. In some instances, the extracellular vesicles can be any membrane-bound particles synthesized without a cell. In some cases, the extracellular vesicles can be exosomes, microvesicles, retrovirus-like particles, apoptotic bodies, apoptosomes, oncosomes, exophers, enveloped viruses, exomeres, or other very large extracellular vesicles.

[0351] In some cases, the systems described herein can be administered to the subject in need thereof via the use of genetically engineered cells generated by introduction of the systems first into allogeneic or autologous cells. The genetically engineered cells can the confer the treatment effects of the systems to the subject infected by the coronavirus.

[0352] In some embodiments, the systems or the polynucleotides encoding the systems can be delivered cells to reduce or eliminate expression of viral genes, where these cells can then be subsequently administered to a subject in need thereof for treatment purposes. In some cases, these cells can be autologous (i.e. transplantation using the subject's own cells) or allogenic (i.e. transplantation using cells from a donor where the donor's human leukocyte antigens or HLAs are compatible to the subject's HLA).

[0353] In an example, any cell of the present disclosure can be engineered to express a chimeric antigen receptor (CAR). The term “chimeric antigen receptor” or alternatively a “CAR” may be used herein to generally refer to a recombinant polypeptide construct comprising at least an extracellular antigen binding domain, a transmembrane domain, and a cytoplasmic signaling domain (also referred to herein as “an intracellular or intrinsic signaling domain”) comprising a functional signaling domain derived from a stimulatory molecule. In some cases, the stimulatory molecule may be the zeta chain associated with the T cell receptor complex. In some cases, the intracellular signaling domain further comprises one or more functional signaling domains derived from at least one costimulatory molecule. In some cases, the costimulatory molecule may comprise 4-1BB (i.e., CD137), CD27, and/or CD28. In one aspect, the CAR comprises an optional leader sequence at the amino-terminus (N-ter) of the CAR fusion protein. In one aspect, the CAR further comprises a leader sequence at the N-terminus of the extracellular antigen recognition domain, wherein the leader sequence is optionally cleaved from the antigen recognition domain (e.g., a scFv) during cellular processing and localization of the CAR to the cellular membrane.

[0354] The CAR, as used herein, may be a first-, second-, third-, or fourth-generation CAR system, a functional variant thereof, or any combination thereof. First-generation CARs (e.g., CD19R or CD19CAR) include an antigen binding domain with specificity for a particular antigen (e.g., an antibody or antigen-binding fragment thereof such as an scFv, a Fab fragment, a VHH domain, or a VH domain of a heavy-chain only antibody), a transmembrane domain derived from an adaptive immune receptor (e.g., the transmembrane domain from the CD28 receptor), and a signaling domain derived from an adaptive immune receptor (e.g., one or more (e.g., three) ITAM domains derived from the intracellular region of the CD3 ζ receptor or FcεRIγ). Second-generation CARs modify the first-generation CAR by addition of a co-stimulatory domain to the intracellular signaling domain portion of the CAR (e.g., derived from co-stimulatory receptors that act alongside T-cell receptors such as CD28, CD137/4-1BB, and CD134/OX40), which abrogates the need for administration of a co-factor (e.g., IL-2) alongside a first-generation CAR. Third-generation CARs add multiple co-stimulatory domains to the intracellular signaling domain portion of the CAR (e.g., CD3ζ-CD28-OX40, or CD3ζ-CD28-41BB). Fourth-generation CARs modify second- or third-generation CARs by the addition of an activating cytokine (e.g., IL-12, IL-23, or IL-27) to the intracellular signaling portion of the CAR (e.g., between one or more of the costimulatory domains and the CD3(ITAM domain) or under the control of a CAR-induced promoter (e.g., the NFAT/IL-2 minimal promoter). Any of the cells disclosed herein (e.g., stem cells) can be engineered to express a heterologous polynucleotide comprising the CAR or a heterologous polynucleotide encoding such heterologous polynucleotide.

[0355] F. Therapeutic Applications

[0356] Disclosed herein, in some embodiments, are methods of treating a coronaviral disease or condition, or a symptom of the coronaviral disease or condition, in a subject, comprising administrating of therapeutic effective amount of the systems or pharmaceutical compositions described herein to the subject. In some embodiments, the method reduces expression of a target viral gene in a cell, comprising steps of: contacting the cell with the systems as described in the instant disclose; upon the contacting, the system reduces expression of the target viral gene in the cell. In some embodiments, the contacting occurs in vivo, ex vivo, or in vitro. In some embodiments, the contacting occurs in vivo. In some embodiments, the contacting occurs ex vivo. In some embodiments, the contacting occurs in vitro. In some embodiments, the system can be expressed in the cell vial delivery of polynucleotides encoding the system to the cell. In some embodiment, the system or can directly administered to the subject.

[0357] In some embodiments, the system can be administered to the subject alone (e.g., standalone treatment). In some embodiments, the system is administered in combination with an additional agent. In some embodiments, the system is a first-line treatment for the disease or condition. In some embodiments, the system is a second-line, third-line, or fourth-line treatment, for the coronaviral disease or condition. In some embodiments, the systems are useful for the treatment of the coronaviral disease or condition, or symptom of the coronaviral disease or condition, disclosed herein. In some embodiments, the system comprises a gene regulating moiety and at least one heterologous RNA polynucleotide.

[0358] In general, methods disclosed herein comprise administering a system by oral administration. However, in some instances, methods comprise administering a system by intraperitoneal injection. In some instances, methods comprise administering a system in the form of an anal suppository. In some instances, methods comprise administering a system by intravenous (“i.v.”) administration. It is conceivable that one can also administer systems disclosed herein by other routes, such as subcutaneous injection, intramuscular injection, intradermal injection, transdermal injection percutaneous administration, intranasal administration, intralymphatic injection, rectal administration intragastric administration, or any other suitable parenteral administration. In some embodiments, routes for local delivery closer to site of injury or inflammation are preferred over systemic routes. Routes, dosage, time points, and duration of administrating therapeutics can be adjusted. In some embodiments, administration of therapeutics is prior to, or after, onset of either, or both, acute and chronic symptoms of the disease or condition.

[0359] An effective dose and dosage of the systems to prevent or treat the coronaviral disease or condition disclosed herein is defined by an observed beneficial response related to the coronal viral disease or condition, or symptom of the disease or condition. In some cases, the beneficial response comprises reduction of expression of viral genomes or viral genes as determined by the methods describe herein. Additional beneficial response comprises preventing, alleviating, arresting, or curing the coronaviral disease or condition, or symptom of the coronaviral disease or condition. An “improvement,” as used herein refers to reduction in expression of viral genomes or viral genes in the cells or in a sample obtained from the subject. In instances where the system is not therapeutically effective or is not providing a sufficient alleviation of the disease or condition, or symptom of the disease or condition, then the dosage amount and/or route of administration can be changed, or an additional agent can be administered to the subject, along with the system. In some embodiments, as a patient is started on a regimen of a system, the patient is also weaned off (e.g., step-wise decrease in dose) a second treatment regimen.

[0360] Suitable dose and dosage administrated to a subject is determined by factors including, but no limited to, the particular system, disease condition and its severity, the identity (e.g., weight, sex, age) of the subject in need of treatment, and can be determined according to the particular circumstances surrounding the case, including, e.g., the specific agent being administered, the route of administration, the condition being treated, and the subject being treated.

[0361] In some embodiments, the administration of the system is hourly, once every 2 hours, 3 hours, 4 hours, 5 hours, 6 hours, 7 hours, 8 hours, 9 hours, 10 hours, 11 hours, 12 hours, 13 hours, 14 hours, 15 hours, 16 hours, 17 hours, 18 hours, 19 hours, 20 hours, 21 hours 22 hours, 23 hours, 1 day, 2 days, 3 days, 4 days, 5 days, 6 days, 7 days, 8 days, 9 days, 10 days, 11 days, 12 days, 13 days, 14 days, 15 days, 1 month, 2 months, 3 months, 4 months, 5 months, 6 months, 7 months, 8 months, 9 months, 10 months, 11 months, 1 year, 2 years, 3 years, 4 years, or 5 years, or 10 years. The effective dosage ranges can be adjusted based on subject's response to the treatment. Some routes of administration will require higher concentrations of effective amount of therapeutics than other routes.

[0362] In certain embodiments, where the patient's condition does not improve, upon the doctor's discretion the administration of system is administered chronically, that is, for an extended period of time, including throughout the duration of the patient's life in order to ameliorate or otherwise control or limit the symptoms of the patient's disease or condition. In certain embodiments wherein a patient's status does improve, the dose of system being administered can be temporarily reduced or temporarily suspended for a certain length of time (i.e., a “drug holiday”). In specific embodiments, the length of the drug holiday is between 2 days and 1 year, including by way of example only, 2 days, 3 days, 4 days, 5 days, 6 days, 7 days, 10 days, 12 days, 15 days, 20 days, 28 days, or more than 28 days. The dose reduction during a drug holiday is, by way of example only, by 10%-100%, including by way of example only 10%, 15%, 20%, 25%, 30%, 35%, 40%, 45%, 50%, 55%, 60%, 65%, 70%, 75%, 80%, 85%, 90%, 95%, and 100%. In certain embodiments, the dose of drug being administered can be temporarily reduced or temporarily suspended for a certain length of time (i.e., a “drug diversion”). In specific embodiments, the length of the drug diversion is between 2 days and 1 year, including by way of example only, 2 days, 3 days, 4 days, 5 days, 6 days, 7 days, 10 days, 12 days, 15 days, 20 days, 28 days, or more than 28 days. The dose reduction during a drug diversion is, by way of example only, by 10%-100%, including by way of example only 10%, 15%, 20%, 25%, 30%, 35%, 40%, 45%, 50%, 55%, 60%, 65%, 70%, 75%, 80%, 85%, 90%, 95%, and 100%. After a suitable length of time, the normal dosing schedule is optionally reinstated.

[0363] In some embodiments, once improvement of the patient's conditions has occurred, a maintenance dose is administered if necessary. Subsequently, in specific embodiments, the dosage or the frequency of administration, or both, is reduced, as a function of the symptoms, to a level at which the improved disease, disorder or condition is retained. In certain embodiments, however, the patient requires intermittent treatment on a long-term basis upon any recurrence of symptoms.

[0364] Toxicity and therapeutic efficacy of such therapeutic regimens are determined by standard pharmaceutical procedures in cell cultures or experimental animals, including, but not limited to, the determination of the LD50 and the ED50. The dose ratio between the toxic and therapeutic effects is the therapeutic index and it is expressed as the ratio between LD50 and ED50. In certain embodiments, the data obtained from cell culture assays and animal studies are used in formulating the therapeutically effective daily dosage range and/or the therapeutically effective unit dosage amount for use in mammals, including humans. In some embodiments, the daily dosage amount of the system described herein lies within a range of circulating concentrations that include the ED50 with minimal toxicity. In certain embodiments, the daily dosage range and/or the unit dosage amount varies within this range depending upon the dosage form employed and the route of administration utilized.

[0365] A system can be used alone or in combination with an additional agent. In some cases, an “additional agent” as used herein is administered alone. The system and the additional agent can be administered together or sequentially. The combination therapies can be administered within the same day, or can be administered one or more days, weeks, months, or years apart.

[0366] G. Pharmaceutical Composition

[0367] A pharmaceutical composition, as used herein, refers to a mixture of a system described herein, with other chemical components (i.e. pharmaceutically acceptable inactive ingredients), such as carriers, excipients, binders, filling agents, suspending agents, flavoring agents, sweetening agents, disintegrating agents, dispersing agents, surfactants, lubricants, colorants, diluents, solubilizers, moistening agents, plasticizers, stabilizers, penetration enhancers, wetting agents, anti-foaming agents, antioxidants, preservatives, or one or more combination thereof. Optionally, the systems include two or more system (e.g., one or more systems and one or more additional agents) as discussed herein. In practicing the methods of treatment or use provided herein, therapeutically effective amounts of systems described herein are administered in a pharmaceutical composition to a mammal having a disease, disorder, or condition to be treated, e.g., an inflammatory disease, fibrostenotic disease, and/or fibrotic disease. In some embodiments, the mammal is a human. A therapeutically effective amount can vary widely depending on the severity of the disease, the age and relative health of the subject, the potency of the system used and other factors. The systems can be used singly or in combination with one or more systems as components of mixtures.

[0368] The pharmaceutical formulations described herein are administered to a subject by appropriate administration routes, including but not limited to, intravenous, intraarterial, oral, parenteral, buccal, topical, transdermal, rectal, intramuscular, subcutaneous, intraosseous, transmucosal, inhalation, or intraperitoneal administration routes. The pharmaceutical formulations described herein include, but are not limited to, aqueous liquid dispersions, self-emulsifying dispersions, solid solutions, liposomal dispersions, aerosols, solid dosage forms, powders, immediate release formulations, controlled release formulations, fast melt formulations, tablets, capsules, pills, delayed release formulations, extended release formulations, pulsatile release formulations, multiparticulate formulations, and mixed immediate and controlled release formulations

[0369] Pharmaceutical compositions comprising a system described herein are manufactured in a conventional manner, such as, by way of example only, by means of conventional mixing, dissolving, granulating, dragee-making, levigating, emulsifying, encapsulating, entrapping or compression processes.

[0370] The pharmaceutical compositions described herein are formulated into any suitable dosage form, including but not limited to, aqueous oral dispersions, liquids, gels, syrups, elixirs, slurries, suspensions, solid oral dosage forms, aerosols, controlled release formulations, fast melt formulations, effervescent formulations, lyophilized formulations, tablets, powders, pills, dragees, capsules, delayed release formulations, extended release formulations, pulsatile release formulations, multiparticulate formulations, and mixed immediate release and controlled release formulations. In one aspect, a system as discussed herein, e.g., system is formulated into a pharmaceutical composition suitable for intramuscular, subcutaneous, or intravenous injection. In one aspect, formulations suitable for intramuscular, subcutaneous, or intravenous injection include physiologically acceptable sterile aqueous or non-aqueous solutions, dispersions, suspensions or emulsions, and sterile powders for reconstitution into sterile injectable solutions or dispersions. Examples of suitable aqueous and non-aqueous carriers, diluents, solvents, or vehicles include water, ethanol, polyols (propyleneglycol, polyethylene-glycol, glycerol, cremophor and the like), suitable mixtures thereof, vegetable oils (such as olive oil) and injectable organic esters such as ethyl oleate. Proper fluidity can be maintained, for example, by the use of a coating such as lecithin, by the maintenance of the required particle size in the case of dispersions, and by the use of surfactants. In some embodiments, formulations suitable for subcutaneous injection also contain additives such as preserving, wetting, emulsifying, and dispensing agents. Prevention of the growth of microorganisms can be ensured by various antibacterial and antifungal agents, such as parabens, chlorobutanol, phenol, sorbic acid, and the like. In some cases it is desirable to include isotonic agents, such as sugars, sodium chloride, and the like. Prolonged absorption of the injectable pharmaceutical form can be brought about by the use of agents delaying absorption, such as aluminum monostearate and gelatin.

[0371] For intravenous injections or drips or infusions, a system described herein is formulated in aqueous solutions, preferably in physiologically compatible buffers such as Hank's solution, Ringer's solution, or physiological saline buffer. For transmucosal administration, penetrants appropriate to the barrier to be permeated are used in the formulation. Such penetrants are generally known in the art. For other parenteral injections, appropriate formulations include aqueous or nonaqueous solutions, preferably with physiologically compatible buffers or excipients. Such excipients are known.

[0372] Parenteral injections can involve bolus injection or continuous infusion. Formulations for injection can be presented in unit dosage form, e.g., in ampoules or in multi-dose containers, with an added preservative. The pharmaceutical composition described herein can be in a form suitable for parenteral injection as a sterile suspensions, solutions or emulsions in oily or aqueous vehicles, and can contain formulatory agents such as suspending, stabilizing and/or dispersing agents. In one aspect, the active ingredient is in powder form for constitution with a suitable vehicle, e.g., sterile pyrogen-free water, before use.

[0373] For administration by inhalation, a system is formulated for use as an aerosol, a mist or a powder. Pharmaceutical compositions described herein are conveniently delivered in the form of an aerosol spray presentation from pressurized packs or a nebuliser, with the use of a suitable propellant, e.g., dichlorodifluoromethane, trichlorofluoromethane, dichlorotetrafluoroethane, carbon dioxide or other suitable gas. In the case of a pressurized aerosol, the dosage unit can be determined by providing a valve to deliver a metered amount. Capsules and cartridges of, such as, by way of example only, gelatin for use in an inhaler or insufflator can be formulated containing a powder mix of the system described herein and a suitable powder base such as lactose or starch.

[0374] Representative intranasal formulations including a system described herein are prepared as solutions in saline, employing benzyl alcohol or other suitable preservatives, fluorocarbons, and/or other solubilizing or dispersing agents known in the art. Preferably these systems and formulations are prepared with suitable nontoxic pharmaceutically acceptable ingredients. The choice of suitable carriers is dependent upon the exact nature of the nasal dosage form desired, e.g., solutions, suspensions, ointments, or gels. Nasal dosage forms generally contain large amounts of water in addition to the active ingredient. Minor amounts of other ingredients such as pH adjusters, emulsifiers or dispersing agents, preservatives, surfactants, gelling agents, or buffering and other stabilizing and solubilizing agents are optionally present. Preferably, the nasal dosage form should be isotonic with nasal secretions.

[0375] Conventional formulation techniques include, e.g., one or a combination of methods: (1) dry mixing, (2) direct compression, (3) milling, (4) dry or non-aqueous granulation, (5) wet granulation, or (6) fusion. Other methods include, e.g., spray drying, pan coating, melt granulation, granulation, fluidized bed spray drying or coating (e.g., wurster coating), tangential coating, top spraying, tableting, extruding and the like.

[0376] H. Kit

[0377] Disclosed herein, in some embodiments, are kits comprising the systems described herein. In some embodiments, the kits disclosed herein can be used to diagnose and/or treat a disease or condition in a subject; or select a patient for treatment and/or monitor a treatment disclosed herein. In some embodiments, the kit comprises the systems described herein, which can be used to perform the methods described herein. Kits comprise an assemblage of materials or components, including at least one of the systems. Thus, in some embodiments the kit contains a system including of the pharmaceutical composition, for the treatment of coronaviral infection. In other embodiments, the kits contains all of the components necessary and/or sufficient to perform an assay for detecting and measuring coronaviral markers, including all controls, directions for performing assays, and any necessary software for analysis and presentation of results.

[0378] In some instances, the kits described herein comprise components for detecting the presence, absence, and/or quantity of a target nucleic acid and/or protein described herein. In some embodiments, the kit comprises the systems (e.g., primers, probes, antibodies) described herein. The disclosure provides kits suitable for assays such as enzyme-linked immunosorbent assay (ELISA), single-molecular array (Simoa). PCR, and qPCR. The exact nature of the components configured in the kit depends on its intended purpose. For example, some kits can be configured for the purpose of treating a disease or condition disclosed herein in a subject. In some embodiments, the kit can be configured particularly for the purpose of treating mammalian subjects. In some embodiments, the kit can be configured particularly for the purpose of treating human subjects. In further embodiments, the kit can be configured for veterinary applications, treating subjects such as, but not limited to, farm animals, domestic animals, and laboratory animals. In some embodiments, the kit can be configured to select a subject for a therapeutic agent, such as those disclosed herein. In some embodiments, the kit is configured to select a subject for treatment for coronaviral infection.

[0379] In some cases, instructions for use can be included in the kit. Optionally, the kit also contains other useful components, such as, diluents, buffers, pharmaceutically acceptable carriers, syringes, catheters, applicators, pipetting or measuring tools, bandaging materials or other useful paraphernalia. The materials or components assembled in the kit can be provided to the practitioner stored in any convenient and suitable ways that preserve their operability and utility. For example the components can be in dissolved, dehydrated, or lyophilized form: they can be provided at room, refrigerated or frozen temperatures. The components are typically contained in suitable packaging material(s). As employed herein, the phrase “packaging material” refers to one or more physical structures used to house the contents of the kit, such as systems and the like. The packaging material is constructed by well-known methods, preferably to provide a sterile, contaminant-free environment. The packaging materials employed in the kit are those customarily utilized in gene expression assays and in the administration of treatments. As used herein, the term “package” refers to a suitable solid matrix or material such as glass, plastic, paper, foil, and the like, capable of holding the individual kit components. Thus, for example, a package can be a glass vial or prefilled syringes used to contain suitable quantities of the pharmaceutical composition. The packaging material has an external label which indicates the contents and/or purpose of the kit and its components.

### EMBODIMENTS

[0380] Embodiment 1. A composition for regulating expression of one or more target viral genes in a cell, comprising: a heterologous polypeptide comprising a gene regulating moiety, wherein said gene regulating moiety is configured to regulate expression of said one or more target viral genes in said cell, and wherein said one or more target viral genes encode (i) a viral RNA-dependent RNA polymerase (RdRP) or a fragment thereof or (ii) a viral nucleocapsid protein (N-protein) or a fragment thereof.

[0381] Embodiment 2. The composition of embodiment 1, wherein said gene regulating moiety is an RNA-guided gene regulating moiety that binds at least a portion of said one or more target viral genes.

[0382] Embodiment 3. The composition of embodiment 2, further comprising at least one heterologous RNA polynucleotide configured to bind said at least said portion of said one or more target viral genes.

[0383] Embodiment 4. The composition of embodiment 3, wherein said at least one heterologous RNA polynucleotide comprises a plurality of heterologous RNA polynucleotides configured to bind a plurality of different portions of said one or more target viral genes.

[0384] Embodiment 5. The composition of embodiment 4, wherein said plurality of heterologous RNA polynucleotides comprises at least three different RNA polynucleotides.

[0385] Embodiment 6. The composition of embodiment 5, wherein said plurality of heterologous RNA polynucleotides comprises at least five different RNA polynucleotides.

[0386] Embodiment 7. The composition of embodiment 3, wherein said one or more target viral genes are from one or more coronaviral genomes, and wherein a single heterologous RNA polynucleotide of said at least one heterologous RNA polynucleotide is configured to target at least 35% of different types of coronaviruses selected from the group consisting of: alphacoronavirus, betacoronavirus, deltacoronavirus, and gammacoronavirus.

[0387] Embodiment 8. The composition of embodiment 4, wherein a plurality of heterologous RNA polynucleotides of said at least one heterologous RNA polynucleotide is configured to collectively target at least 45% of said different types of coronaviruses.

[0388] Embodiment 9. The composition of embodiment 8, wherein said plurality of heterologous RNA polynucleotides is configured to collectively target at least 80% of said different types of coronaviruses.

[0389] Embodiment 10. The composition of embodiment 9, wherein at most six heterologous RNA polynucleotides of said plurality are configured to collectively target at least 80% of said different types of coronaviruses.

[0390] Embodiment 11. The composition of embodiment 9, wherein at most ten heterologous RNA polynucleotides of said plurality are configured to collectively target at least 90% of said different types of coronaviruses.

[0391] Embodiment 12. The composition of embodiment 3, wherein each of said at least one heterologous RNA polynucleotide has a length ranging from 10 to 30 nucleotides.

[0392] Embodiment 13. The composition of embodiment 12, wherein said at least one heterologous RNA polynucleotide comprises at most 2 mismatches when optimally aligned with MERS and/or SARS viral genome.

[0393] Embodiment 14. The composition of embodiment 3, wherein each of said at least one heterologous RNA polynucleotide has at least 90% sequence identity to a sequence selected from SEQ ID NOs: 4001-7203, 12101-12140, and 13101-13122.

[0394] Embodiment 15. The composition of embodiment 3, wherein said one or more target viral genes are from one or more coronaviral genomes, wherein the one or more target viral genes encodes RdRP or N-protein.

[0395] Embodiment 16. The composition of embodiment 15, wherein said at least one heterologous RNA polynucleotide is configured to affect about 80% reduction in said expression of said one or more target viral genes encoding the viral RdRP or a fragment thereof.

[0396] Embodiment 17. The composition of embodiment 15, wherein said at least one heterologous RNA polynucleotide is configured to affect about 70% reduction in said expression of said one or more target viral genes encoding said viral N-protein or a fragment thereof.

[0397] Embodiment 18. The composition of embodiment 2, wherein said RNA-guided gene regulating moiety is a CRISPR/Cas protein selected from the group consisting of: C2C1, C2C2, C2C3, Cas1, Cas1B, Cas2, Cas3, Cas4, Cas5, Cas5e, Cas6, Cas6e, Cas6f, Cas7, Cas8a, Cas8a1, Cas8a2, Cas8b, Cas8c, Cas9, Cas10, Casl Od, Cas10, Cas10d, Cas11, Cas12, Cas13, Cas14, CasF, CasG, CasH, CasX, CaxY, Cpf1, Csy1, Csy2, Csy3, Cse1, Cse2, Cse3, Cse4, Csc1, Csc2, Csa5, Csn2, Csm2, Csm3, Csm4, Csm5, Csm6, Cmr1, Cmr3, Cmr4, Cmr5, Cmr6, Csb1, Csb2, Csb3, Csx17, Csx14, Csx10, Csx16, CsaX, Csx3, Csx1, Csx15, Csf1, Csf2, Csf3. Csf4, a modification thereof, and a combination thereof.

[0398] Embodiment 19. The composition of embodiment 2, wherein said RNA-guided gene regulating moiety exhibits RNA cleaving activity.

[0399] Embodiment 20. The composition of embodiment 1, wherein (i) said composition or (ii) one or more polynucleotides encoding said composition is packaged in a delivery vehicle selected from the group consisting of: a liposome, a nanoparticle, and a viral capsule.

[0400] Embodiment 21. A method of reducing expression of one or more target viral genes in a cell, comprising: contacting the cell with the composition of any one of embodiments 1-20, wherein upon said contacting, said composition effects reduced expression of said one or more target viral genes in said cell.

[0401] Embodiment 22. The method of embodiment 21, wherein said contacting occurs in vivo, ex vivo, or in vitro.

[0402] Embodiment 23. The method of embodiment 21, further comprising expressing said composition in said cell.

[0403] Embodiment 24. The method of embodiment 21, further comprising administering (i) said composition or (ii) one or more polynucleotides encoding said composition to a subject in need thereof, thereby reducing said expression of said one or more target viral genes in said subject.

[0404] Embodiment 25. The method of embodiment 21, further comprising, subsequent to said contacting, administering said cell to a subject in need thereof.

[0405] Embodiment 26. A kit comprising the composition of any one of embodiments 1-20.

[0406] Embodiment 27. A kit comprising one or more polynucleotides encoding the composition of any one of embodiments 1-19.

[0407] Embodiment 28. A reaction mixture comprising the composition of any one of embodiments 1-20 and a biological sample.

[0408] Embodiment 29. The reaction mixture of embodiment 28, wherein said biological sample is selected from the group consisting of: urine, blood, cell, tissue, organ, organism, and a combination thereof.

[0409] Embodiment 30. A composition for regulating expression of one or more target viral genes in a cell, comprising: at least one heterologous RNA polynucleotide configured to bind at least a portion of said one or more target viral genes in said cell, wherein said one or more target viral genes encodes (i) a viral RNA-dependent RNA polymerase (RdRP) or a fragment thereof or (ii) a viral nucleocapsid protein (N-protein) or a fragment thereof, and wherein said at least one heterologous RNA polynucleotide is capable of forming a complex with a heterologous polypeptide comprising a gene regulating moiety to regulate expression of said one or more target viral genes in said cell.

[0410] Embodiment 31. The composition of embodiment 30, wherein said at least one heterologous RNA polynucleotide comprises a plurality of heterologous RNA polynucleotides configured to bind a plurality of different portions of said one or more target viral genes.

[0411] Embodiment 32. The composition of embodiment 31, wherein said plurality of heterologous RNA polynucleotides comprises at least three different RNA polynucleotides.

[0412] Embodiment 33. The composition of embodiment 32, wherein said plurality of heterologous RNA polynucleotides comprises at least five different RNA polynucleotides.

[0413] Embodiment 34. The composition of embodiment 30, wherein said one or more target viral genes are from one or more coronaviral genomes, and wherein a single heterologous RNA polynucleotide of said at least one heterologous RNA polynucleotide is configured to target at least 35% of different types of coronaviruses selected from the group consisting of: alphacoronavirus, betacoronavirus, deltacoronavirus, and gammacoronavirus.

[0414] Embodiment 35. The composition of embodiment 34, wherein a plurality of heterologous RNA polynucleotides of said at least one heterologous RNA polynucleotide is configured to collectively target at least 45% of said different types of coronaviruses.

[0415] Embodiment 36. The composition of embodiment 35, wherein said plurality of heterologous RNA polynucleotides is configured to collectively target at least 80% of said different types of coronaviruses.

[0416] Embodiment 37. The composition of embodiment 36, wherein at most six heterologous RNA polynucleotides of said plurality are configured to collectively target at least 80% of said different types of coronaviruses.

[0417] Embodiment 38. The composition of embodiment 36, wherein at most ten heterologous RNA polynucleotides of said plurality are configured to collectively target at least 90% of said different types of coronaviruses.

[0418] Embodiment 39. The composition of embodiment 30, wherein each of said at least one heterologous RNA polynucleotide has a length ranging from 10 to 30 nucleotides.

[0419] Embodiment 40. The composition of embodiment 39, wherein said at least one heterologous RNA polynucleotide comprises at most 2 mismatches when optimally aligned with MERS and/or SARS viral genome.

[0420] Embodiment 41. The composition of embodiment 30, wherein each of said at least one heterologous RNA polynucleotide has at least 90% sequence identity to a sequence selected from SEQ ID NOs: 4001-7203, 12101-12140, and 13101-13122.

[0421] Embodiment 42. The composition of embodiment 30, wherein said at least one heterologous RNA polynucleotide is configured to affect about 70% reduction in said expression of said one or more target viral genes in said cell as compared to one or more non-targeting heterologous RNA polynucleotides.

[0422] Embodiment 43. The composition of embodiment 42, wherein said at least one heterologous RNA polynucleotide is configured to affect about 75% reduction in said expression of said one or more target viral genes encoding the viral RdRP or a fragment thereof.

[0423] Embodiment 44. The composition of embodiment 42, wherein said at least one heterologous RNA polynucleotide is configured to affect about 80% reduction in said expression of said one or more target viral genes encoding said viral N-protein or a fragment thereof.

[0424] Embodiment 45. The composition of embodiment 30, further comprising said heterologous polypeptide comprising said heterologous gene regulating moiety.

[0425] Embodiment 46. The composition of embodiment 30, wherein said gene regulating moiety is a CRISPR/Cas protein selected from the group consisting of C2C1, C2C2, C2C3, Cas1, Cas1B, Cas2, Cas3, Cas4, Cas5, Cas5e, Cas6, Cas6e, Cas6f, Cas7, Cas8a, Cas8a1, Cas8a2, Cas8b, Cas8c, Cas9, Cas10, Cas10d, Cas10, Cas10d, Cas11, Cas12, Cas13, Cas14, CasF, CasG, CasH, CasX, CaxY, Cpf1, Csy1, Csy2, Csy3, Cse1, Cse2, Cse3, Cse4, Csc1, Csc2, Csa5, Csn2, Csm2, Csm3, Csm4, Csm5, Csm6, Cmr1, Cmr3, Cmr4, Cmr5, Cmr6, Csb1, Csb2, Csb3, Csx17, Csx14, Csx10, Csx16, CsaX, Csx3, Csx1, Csx15, Csf1, Csf2, Csf3, Csf4, a modification thereof, and a combination thereof.

[0426] Embodiment 47. The composition of embodiment 30, wherein said gene regulating moiety exhibits RNA cleaving activity.

[0427] Embodiment 48. The composition of embodiment 30, wherein (i) said composition or (ii) one or more polynucleotides encoding said composition is packaged in a delivery vehicle selected from the group consisting of a liposome, a nanoparticle, and a viral capsule.

[0428] Embodiment 49. A method of reducing expression of one or more target viral genes in a cell, comprising: contacting the cell with the composition of any one of embodiments 30-48, wherein upon said contacting, said composition effects reduced expression of said one or more target viral genes in said cell.

[0429] Embodiment 50. The method of embodiment 49, wherein said contacting occurs in vivo, ex vivo, or in vitro.

[0430] Embodiment 51. The method of embodiment 49, further comprising expressing said composition in said cell.

[0431] Embodiment 52. The method of embodiment 49, further comprising administering (i) said composition or (ii) one or more polynucleotides encoding said composition to a subject in need thereof, thereby reducing said expression of said one or more target viral genes in said subject.

[0432] Embodiment 53. The method of embodiment 49, further comprising, subsequent to said contacting, administering said cell to a subject in need thereof.

[0433] Embodiment 54. A kit comprising the composition of any one of embodiments 30-48.

[0434] Embodiment 55. A kit comprising one or more polynucleotides encoding the composition of any one of embodiments 3047.

[0435] Embodiment 56. A nucleic acid composition comprising a RNA-binding guide RNA, wherein said RNA-binding guide RNA comprises a targeting sequence that has a length ranging from 10 to 30 nucleotides and is characterized by one or more members selected from the group consisting of: (i) said targeting sequence exhibits at least 90% sequence identity to any one of SEQ ID NOs: 4001-7203, 12101-12140, and 13101-13122; (ii) said targeting sequence is configured to bind a polynucleotide fragment within a coronavirus genome, wherein said polynucleotide fragment has a length of about 10 to 30 nucleotides and exhibits at least 95% sequence identity to a conserved region of said coronavirus genome that encodes (1) a RNA-dependent RNA polymerase (RdRP) or a fragment thereof or (2) a nucleocapsid protein (N-protein) or a fragment thereof, and (iii) said targeting sequence comprises at most 2 mismatches when optimally aligned with MERS and/or SARS viral genome.

[0436] Embodiment 57. The nucleic acid composition of embodiment 56, wherein, in (i), said targeting sequence exhibits at least 95% sequence identity to any one of SEQ ID NOs: 4001-7203, 12101-12140, and 13101-13122.

[0437] Embodiment 58. The nucleic acid composition of embodiment 56, wherein, in (ii), said conserved region encodes (1) said RdRP or said fragment thereof and (2) said N-protein or said fragment thereof.

[0438] Embodiment 59. The nucleic acid composition of embodiment 56, wherein, in (ii), said polynucleotide fragment exhibits at least 90% sequence identity to any one of SEQ ID NOs: 4001-7203, 12101-12140, and 13101-13122.

[0439] Embodiment 60. The nucleic acid composition of embodiment 59, wherein said polynucleotide fragments directed to said RdRP or said fragment thereof and exhibits at least 90% sequence identity to any one of SEQ ID NOs: 12101-12120.

[0440] Embodiment 61. The nucleic acid composition of embodiment 59, wherein said polynucleotide fragments directed to said N-protein or said fragment thereof and exhibits at least 90% sequence identity to any one of SEQ ID NOS: 12121-12140.

[0441] Embodiment 62. The nucleic acid composition of embodiment 56, wherein, in (iii), said targeting sequence comprises at most 1 mismatch when optimally aligned with MERS and/or SARS viral genome.

[0442] Embodiment 63. The nucleic acid composition of embodiment 56, wherein, in (iii), a mismatch of said at most 2 mismatches is an insertion or a deletion.

[0443] Embodiment 64. The nucleic acid composition of embodiment 56, wherein said targeting sequence is characterized by two or more members selected from the group consisting of (i), (ii), and (iii).

[0444] Embodiment 65. The nucleic acid composition of embodiment 64, wherein said targeting sequence is characterized by all members of (i), (ii), and (iii).

[0445] Embodiment 66. The nucleic acid composition of any one of embodiments 56-65, further comprising a plurality of RNA-binding guide RNAs comprising said RNA-binding guide RNA, wherein each of said plurality of RNA-binding guide RNAs is characterized by one or more members selected from the group consisting of: (i), (ii), and (iii).

[0446] Embodiment 67. The nucleic acid composition of embodiment 66, wherein said plurality comprises at least two RNA-binding guide RNAs.

[0447] Embodiment 68. The nucleic acid composition of embodiment 67, wherein said plurality comprises at least six RNA-binding guide RNAs.

[0448] Embodiment 69. A nucleic acid composition comprising a RNA-binding guide RNA, wherein said RNA-binding guide RNA comprises a targeting sequence that has a length ranging from 10 to 30 nucleotides and is selected from the group consisting of:

[0449] (i) a RNA polynucleotide having at least 90% sequence identity to SEQ ID NO: 13101;

[0450] (ii) a RNA polynucleotide having at least 90% sequence identity to SEQ ID NO: 13102;

[0451] (iii) a RNA polynucleotide having at least 90% sequence identity to SEQ ID NO: 13103;

[0452] (iv) a RNA polynucleotide having at least 90% sequence identity to SEQ ID NO: 13104;

[0453] (v) a RNA polynucleotide having at least 90% sequence identity to SEQ ID NO: 13105; and

[0454] (vi) a RNA polynucleotide having at least 90% sequence identity to SEQ ID NO: 13106.

[0455] Embodiment 70. The nucleic acid composition of embodiment 69, wherein:

[0456] (i) said RNA polynucleotide has at least 95% sequence identity to SEQ ID NO: 13101;

[0457] (ii) said RNA polynucleotide has at least 95% sequence identity to SEQ ID NO: 13102;

[0458] (iii) said RNA polynucleotide has at least 95% sequence identity to SEQ ID NO: 13103;

[0459] (iv) said RNA polynucleotide has at least 95% sequence identity to SEQ ID NO: 13104;

[0460] (v) said RNA polynucleotide has at least 95% sequence identity to SEQ ID NO: 13105; or

[0461] (vi) said RNA polynucleotide has at least 95% sequence identity to SEQ ID NO: 13106.

[0462] Embodiment 71. The nucleic acid composition of embodiment 69 or 70, further comprising a plurality of different RNA-binding guide RNAs comprising said RNA-binding guide RNA, wherein each RNA-binding guide RNAs of said plurality has a targeting sequence selected from the group consisting of; (i), (ii), (iii), (iv), (v), and (vi).

[0463] Embodiment 72. The nucleic acid composition of embodiment 71, wherein said plurality comprises two different guide RNAs.

[0464] Embodiment 73. The nucleic acid composition of embodiment 72, wherein said plurality comprises three different guide RNAs.

[0465] Embodiment 74. The nucleic acid composition of embodiment 73, wherein said plurality comprises four different guide RNAs.

[0466] Embodiment 75. The nucleic acid composition of embodiment 74, wherein said plurality comprises five different guide RNAs.

[0467] Embodiment 76. The nucleic acid composition of embodiment 75, wherein said plurality comprises six different guide RNAs.

[0468] Embodiment 77. A nucleic acid composition comprising a plurality of RNA-binding guide RNAs, wherein no more than six members of said plurality collectively exhibits specific binding to at least 50% of different types of coronaviruses selected from the group consisting of; alphacoronavirus, betacoronavirus, deltacoronavirus, and gammacoronavirus.

[0469] Embodiment 78. A nucleic acid composition comprising a plurality of RNA-binding guide RNAs, wherein no more than six members of said plurality collectively exhibits specific binding to at least 50% of different types of coronaviruses selected from the group consisting of coronaviruses listed by GenBank Access ID.

[0470] Embodiment 79. The nucleic acid composition of embodiment 77 or 78, wherein said different types of coronaviruses are selected from the group consisting of coronaviruses listed by GenBank Access ID.

[0471] Embodiment 80. The nucleic acid composition of embodiment 77 or 78, wherein a single member of said plurality exhibits specific binding to at least 35% of said different types of coronaviruses.

[0472] Embodiment 81. The nucleic acid composition of embodiment 77 or 78, wherein no more than two members of said plurality collectively exhibits specific binding to at least 45% of said different types of coronaviruses.

[0473] Embodiment 82. The nucleic acid composition of embodiment 77 or 78, wherein no more than three members of said plurality collectively exhibits specific binding to at least 65% of said different types of coronaviruses.

[0474] Embodiment 83. The nucleic acid composition of embodiment 77 or 78, wherein no more than four members of said plurality collectively exhibits specific binding to at least 80% of said different types of coronaviruses.

[0475] Embodiment 84. The nucleic acid composition of embodiment 77 or 78, wherein no more than five members of said plurality collectively exhibits specific binding to at least 85% of said different types of coronaviruses.

[0476] Embodiment 85. The nucleic acid composition of embodiment 77 or 78, wherein no more than six members of said plurality collectively exhibits specific binding to at least 90% of said different types of coronaviruses.

[0477] Embodiment 86. The nucleic acid composition of embodiment 77 or 78, wherein no more than seven members of said plurality collectively exhibits specific binding to at least 93% of said different types of coronaviruses.

[0478] Embodiment 87. The nucleic acid composition of embodiment 77 or 78, wherein no more than eight members of said plurality collectively exhibits specific binding to at least 95% of said different types of coronaviruses.

[0479] Embodiment 88. The nucleic acid composition of embodiment 77 or 78, wherein no more than nine members of said plurality collectively exhibits specific binding to at least 96% of said different types of coronaviruses.

[0480] Embodiment 89. The nucleic acid composition of embodiment 77 or 78, wherein no more than ten members of said plurality collectively exhibits specific binding to at least 97% of said different types of coronaviruses.

[0481] Embodiment 90. The nucleic acid composition of embodiment 77 or 78, wherein no more than eleven members of said plurality collectively exhibits specific binding to at least 98% of said different types of coronaviruses.

[0482] Embodiment 91. The nucleic acid composition of embodiment 77 or 78, wherein no more than fourteen members of said plurality collectively exhibits specific binding to at least 99% of said different types of coronaviruses.

[0483] Embodiment 92. The nucleic acid composition of embodiment 77 or 78, wherein no more than sixteen members of said plurality collectively exhibits specific binding to at least 99.5% of said different types of coronaviruses.

[0484] Embodiment 93. The nucleic acid composition of embodiment 77, wherein said plurality of RNA-binding guide RNAs are selected from the group consisting of the sequences in Table 4.

[0485] Embodiment 94. The nucleic acid composition of embodiment 78, wherein said plurality of RNA-binding guide RNAs are selected from the group consisting of the sequences in Table 4.

[0486] Embodiment 95. A composition for reducing transfection of a virus in a population of cells, comprising: a heterologous polypeptide comprising a gene regulating moiety, wherein said gene regulating moiety is configured to regulate expression of a target viral genome segment of said virus in a cell of said population of cells, and wherein said target viral genome segment comprises at least one non-coding region or a fragment thereof.

[0487] Embodiment 96. The composition of embodiment 95, wherein said gene regulating moiety is an RNA-guided gene regulating moiety that binds at least a portion of said target viral genome segment.

[0488] Embodiment 97. The composition of embodiment 96, further comprising at least one heterologous RNA polynucleotide configured to bind said at least said portion of said target viral genome segment.

[0489] Embodiment 98. The composition of embodiment 97, wherein said at least one heterologous RNA polynucleotide comprises a plurality of heterologous RNA polynucleotides configured to bind a plurality of different portions of said target viral genome segment.

[0490] Embodiment 99. The composition of embodiment 98, wherein said plurality of heterologous RNA polynucleotides comprises at least three different RNA polynucleotides.

[0491] Embodiment 10. The composition of embodiment 99, wherein said plurality of heterologous RNA polynucleotides comprises at least six different RNA polynucleotides.

[0492] Embodiment 101. The composition of embodiment 95, wherein said target viral genome segment is from an influenza virus, and said heterologous polypeptide is configured to effect reduced transfection of said influenza virus in said population of cells.

[0493] Embodiment 102. The composition of embodiment 101, wherein said at least one non-coding region is conserved across a plurality of influenza virus types selected from the group consisting of: influenza A, influenza B, influenza C, and influenza D.

[0494] Embodiment 103. The composition of embodiment 101, wherein said at least one non-coding region is conserved across a plurality of influenza A subtypes.

[0495] Embodiment 104. The composition of embodiment 101, wherein said target viral genome segment comprises a sequence having at least 90% sequence identity to a sequence selected from SEQ ID NOs: 13501-13548.

[0496] Embodiment 105. The composition of embodiment 101, wherein said heterologous polypeptide is configured to effect at least a 50% reduction in said transfection of said influenza virus in said population of cells.

[0497] Embodiment 106. The composition of embodiment 105, wherein said heterologous polypeptide is configured to effect at least a 60% reduction in said transfection of said influenza virus in said population of cells.

[0498] Embodiment 107. The composition of embodiment 106, wherein said heterologous polypeptide is configured to effect at least a 70% reduction in said transfection of said influenza virus in said population of cells.

[0499] Embodiment 108. The composition of embodiment 95, wherein said target viral genome segment comprises a first non-coding region and a second non-coding region that is different from said first non-coding region, and wherein said first and second non-coding regions are operatively coupled to a same viral polypeptide.

[0500] Embodiment 109. The composition of embodiment 108, wherein a polynucleotide sequence encoding said same viral polypeptide or a fragment thereof is flanked by said first and second non-coding regions.

[0501] Embodiment 110. The composition of embodiment 109, wherein said same viral polypeptide is selected from the group consisting of: a neuraminidase and a hemagglutinin.

[0502] Embodiment 111. The composition of embodiment 109, wherein said same viral polypeptide is said neuraminidase.

[0503] Embodiment 112. The composition of embodiment 95, wherein said target viral genome segment comprises (i) a first non-coding region operatively coupled to a first viral polypeptide and (ii) a second non-coding region operatively coupled to a second viral polypeptide, wherein said first and second viral polypeptides are different.

[0504] Embodiment 113. The composition of embodiment 112, wherein said first viral polypeptide is a neuraminidase and said second viral polypeptide is selected from the group consisting of; a polymerase, a hemagglutinin, a nucleoprotein, a matrix protein, a non-structural protein, and a nuclear export protein.

[0505] Embodiment 114. The composition of embodiment 112, wherein said first viral polypeptide is a hemagglutinin and said second viral polypeptide is selected from the group consisting of: a polymerase, a nucleoprotein, a matrix protein, a non-structural protein, and a nuclear export protein.

[0506] Embodiment 115. The composition of embodiment 97, wherein each of said at least one heterologous RNA polynucleotide has a length ranging from 10 to 30 nucleotides.

[0507] Embodiment 116. The composition of embodiment 96, wherein said RNA-guided gene regulating moiety is a CRISPR/Cas protein selected from the group consisting of: C2C1, C2C2, C2C3, Cas1, Cas1B, Cas2, Cas3, Cas4, Cas5, Cas5e, Cas6, Cas6e, Cas6f, Cas7, Cas8a, Cas8a1, Cas8a2, Cas8b, Cas8c, Cas9, Cas10, Cas10d, Cas10, Cas10d, Cas 11, Cas12, Cas13, Cas14, CasF, CasG, CasH, CasX, CaxY, Cpf1, Csy1, Csy2, Csy3, Cse1, Cse2, Cse3, Cse4, Csc1, Csc2, Csa5, Csn2, Csm2, Csm3, Csm4, Csm5, Csm6, Cmr1, Cmr3, Cmr4, Cmr5, Cmr6, Csb1, Csb2, Csb3, Csx17, Csx14, Csx10, Csx16, CsaX, Csx3, Csx1, Csx15, Csf1, Csf2, Csf3, Csf4, a modification thereof, and a combination thereof.

[0508] Embodiment 117. The composition of embodiment 96, wherein said RNA-guided gene regulating moiety exhibits RNA cleaving activity.

[0509] Embodiment 118. The composition of embodiment 95, wherein (i) said composition or (ii) one or more polynucleotides encoding said composition is packaged in a delivery vehicle selected from the group consisting of: a liposome, a nanoparticle, and a viral capsule.

[0510] Embodiment 119. A method of reducing transfection of a virus in a population of cells, comprising: contacting the population of cells with the composition of any one of embodiments 1-24, wherein upon said contacting, said composition effects reduced transfection of said virus in said population of cells.

[0511] Embodiment 120. The method of embodiment 119, wherein said contacting occurs in vivo, ex vivo, or in vitro.

[0512] Embodiment 121. The method of embodiment 119, further comprising expressing said composition in said cell.

[0513] Embodiment 122. The method of embodiment 119, further comprising administering (i) said composition or (ii) one or more polynucleotides encoding said composition to a subject in need thereof, thereby reducing said expression of said target viral genome segment in said subject.

[0514] Embodiment 123. The method of embodiment 119, further comprising, subsequent to said contacting, administering said cell to a subject in need thereof.

[0515] Embodiment 124. A kit comprising the composition of any one of embodiments 95-118.

[0516] Embodiment 125. A kit comprising one or more polynucleotides encoding the composition of any one of embodiments 95-118.

[0517] Embodiment 126. A reaction mixture comprising the composition of any one of embodiments 95-118 and a biological sample.

[0518] Embodiment 127. The reaction mixture of embodiment 126, wherein said biological sample is selected from the group consisting of: urine, blood, cell, tissue, organ, organism, and a combination thereof.

[0519] Embodiment 128. A composition for reducing transfection of a virus in a population of cells, comprising: at least one heterologous RNA polynucleotide configured to bind a target viral genome segment of said virus in a cell of said population of cells, wherein said target viral genome segment comprises at least one non-coding region or a fragment thereof, wherein said at least one heterologous RNA polynucleotide is capable of forming a complex with a heterologous polypeptide comprising a gene regulating moiety to reduce transfection of said virus in said population of cells.

[0520] Embodiment 129. The composition of embodiment 128, wherein said at least one heterologous RNA polynucleotide comprises a plurality of heterologous RNA polynucleotides configured to bind a plurality of different portions of said target viral genome segment.

[0521] Embodiment 130. The composition of embodiment 129, wherein said plurality of heterologous RNA polynucleotides comprises at least three different RNA polynucleotides.

[0522] Embodiment 131. The composition of embodiment 130, wherein said plurality of heterologous RNA polynucleotides comprises at least six different RNA polynucleotides.

[0523] Embodiment 132. The composition of embodiment 129, wherein said target viral genome segment is from an influenza virus.

[0524] Embodiment 133. The composition of embodiment 132, wherein said at least one non-coding region is conserved across a plurality of influenza virus types selected from the group consisting of: influenza A, influenza B, influenza C, and influenza D.

[0525] Embodiment 134. The composition of embodiment 132, wherein said at least one non-coding region is conserved across a plurality of influenza A subtypes.

[0526] Embodiment 135. The composition of embodiment 130, wherein said heterologous polypeptide is configured to effect at least a 50% reduction in said transfection of said influenza virus in said population of cells.

[0527] Embodiment 136. The composition of embodiment 135, wherein said heterologous polypeptide is configured to effect at least a 60% reduction in said transfection of said influenza virus in said population of cells.

[0528] Embodiment 137. The composition of embodiment 136, wherein said heterologous polypeptide is configured to effect at least a 70% reduction in said transfection of said influenza virus in said population of cells.

[0529] Embodiment 138. The composition of embodiment 129, wherein said target viral genome segment comprises a first non-coding region and a second non-coding region that is different from said first non-coding region, and wherein said first and second non-coding regions are operatively coupled to a same viral polypeptide.

[0530] Embodiment 139. The composition of embodiment 138, wherein a polynucleotide sequence encoding said same viral polypeptide or a fragment thereof is flanked by said first and second non-coding regions.

[0531] Embodiment 140. The composition of embodiment 138, wherein said same viral polypeptide is selected from the group consisting of: a neuraminidase and a hemagglutinin.

[0532] Embodiment 141. The composition of embodiment 138, wherein said same viral polypeptide is said neuraminidase.

[0533] Embodiment 142. The composition of embodiment 128, wherein said target viral genome segment comprises (i) a first non-coding region operatively coupled to a first viral polypeptide and (ii) a second non-coding region operatively coupled to a second viral polypeptide, wherein said first and second viral polypeptides are different.

[0534] Embodiment 143. The composition of embodiment 142, wherein said first viral polypeptide is a neuraminidase and said second viral polypeptide is selected from the group consisting of: a polymerase, a hemagglutinin, a nucleoprotein, a matrix protein, a non-structural protein, and a nuclear export protein.

[0535] Embodiment 144. The composition of embodiment 143, wherein said first viral polypeptide is a hemagglutinin and said second viral polypeptide is selected from the group consisting of: a polymerase, a nucleoprotein, a matrix protein, a non-structural protein, and a nuclear export protein.

[0536] Embodiment 145. The composition of embodiment 129, wherein each of said at least one heterologous RNA polynucleotide has a length ranging from 10 to 30 nucleotides.

[0537] Embodiment 146. The composition of embodiment 128, further comprising said heterologous polypeptide comprising said gene regulating moiety.

[0538] Embodiment 147. The composition of embodiment 146, wherein said gene regulating moiety is an RNA-guided gene regulating moiety that binds at least a portion of said target viral genome segment.

[0539] Embodiment 148. The composition of embodiment 129, wherein said gene regulating moiety is a CRISPR/Cas protein selected from the group consisting of: C2C1, C2C2, C2C3, Cas1, Cas1B, Cas2, Cas3, Cas4, Cas5, Cas5e, Cas6, Cas6e, Cas6f, Cas7, Cas8a, Cas8a1, Cas8a2, Cas8b, Cas8c, Cas9, Cas10, Cas10d, Cas10, Cas10d, Cas 11, Cas12, Cas13, Cas14, CasF, CasG, CasH, CasX, CaxY, Cpf1, Csy1, Csy2, Csy3, Cse1, Cse2, Cse3, Cse4, Csc1, Csc2, Csa5, Csn2, Csm2, Csm3, Csm4, Csm5, Csm6, Cmr1, Cmr3, Cmr4, Cmr5, Cmr6, Csb1, Csb2, Csb3, Csx17, Csx14, Csx10, Csx16, CsaX, Csx3, Csx1, Csx15, Csf1, Csf2, Csf3, Csf4, a modification thereof, and a combination thereof.

[0540] Embodiment 149. The composition of embodiment 129, wherein said gene regulating moiety exhibits RNA cleaving activity.

[0541] Embodiment 150. The composition of embodiment 129, wherein (i) said composition or (ii) one or more polynucleotides encoding said composition is packaged in a delivery vehicle selected from the group consisting of: a liposome, a nanoparticle, and a viral capsule.

[0542] Embodiment 151. A method of reducing transfection of a virus in a population of cells, comprising: contacting the population of cells with the composition of any one of embodiments 34-56, wherein upon said contacting, said composition effects reduced transfection of said virus in said population of cells.

[0543] Embodiment 152. The method of embodiment 151, wherein said contacting occurs in vivo, ex vivo, or in vitro.

[0544] Embodiment 153. The method of embodiment 151, further comprising expressing said composition in said cell.

[0545] Embodiment 154. The method of embodiment 151, further comprising administering (i) said composition or (ii) one or more polynucleotides encoding said composition to a subject in need thereof, thereby reducing said expression of said target viral genome segment in said subject.

[0546] Embodiment 155. The method of embodiment 151, further comprising, subsequent to said contacting, administering said cell to a subject in need thereof.

[0547] Embodiment 156. A kit comprising the composition of any one of embodiments 128-150.

[0548] Embodiment 157. A kit comprising one or more polynucleotides encoding the composition of any one of embodiments 128-150.

[0549] Embodiment 158. A nucleic acid composition comprising a RNA-binding guide RNA, wherein said RNA-binding guide RNA comprises a targeting sequence that has a length ranging from 10 to 30 nucleotides; and wherein said RNA-binding guide RNA has at least 90% sequence identity to a sequence selected from SEQ ID NOs:13301-13348.

[0550] Embodiment 159. The nucleic acid composition of embodiment 150, further comprising a plurality of RNA-binding guide RNAs comprising said RNA-binding guide RNA, wherein each of said plurality of RNA-binding guide RNAs has at least 90% sequence identity to a sequence selected from SEQ ID NOs:13301-13348.

[0551] Embodiment 160. The nucleic acid composition of embodiment 159, wherein said plurality of RNA-binding guide RNAs comprise at most six RNA-binding guide RNAs.

[0552] Embodiment 161. A nucleic acid composition comprising a RNA-binding guide RNA, wherein said RNA-binding guide RNA comprises a targeting sequence that has a length ranging from 10 to 30 nucleotides and is selected from the group consisting of:

(i) a RNA polynucleotide having at least 90% sequence identity to SEQ ID NO: 13319;
(ii) a RNA polynucleotide having at least 90% sequence identity to SEQ ID NO: 13320;
(iii) a RNA polynucleotide having at least 90% sequence identity to SEQ ID NO: 13321;
(iv) a RNA polynucleotide having at least 90% sequence identity to SEQ ID NO: 13322;
(v) a RNA polynucleotide having at least 90% sequence identity to SEQ ID NO: 13323;
(vi) a RNA polynucleotide having at least 90% sequence identity to SEQ ID NO: 13324;
(vii) a RNA polynucleotide having at least 90% sequence identity to SEQ ID NO: 13331;
(viii) a RNA polynucleotide having at least 90% sequence identity to SEQ ID NO: 13332;
(ix) a RNA polynucleotide having at least 90% sequence identity to SEQ ID NO: 13333;
(x) a RNA polynucleotide having at least 90% sequence identity to SEQ ID NO: 13334;
(xi) a RNA polynucleotide having at least 90% sequence identity to SEQ ID NO: 13335; and
(xii) a RNA polynucleotide having at least 90% sequence identity to SEQ ID NO: 13336.

[0553] Embodiment 162. The nucleic acid composition of embodiment 161, comprising a plurality of different RNA binding guide RNAs comprising said RNA-binding guide RNA, wherein each RNA-binding guide RNA of said plurality has a targeting sequence selected from the group consisting of: (i) through (xii).

[0554] Embodiment 163. The nucleic acid composition of embodiment 162, wherein said plurality comprises at least two different guide RNAs.

[0555] Embodiment 164. The nucleic acid composition of embodiment 163, wherein said plurality comprises at least three different guide RNAs.

[0556] Embodiment 165. The nucleic acid composition of embodiment 164, wherein said plurality comprises at least four different guide RNAs.

[0557] Embodiment 166. The nucleic acid composition of embodiment 165, wherein said plurality comprises at least five different guide RNAs.

[0558] Embodiment 167. The nucleic acid composition of embodiment 166, wherein said plurality comprises at least six different guide RNAs.

[0559] Embodiment 168. The nucleic acid composition of embodiment 163, wherein said at least two different guide RNAs are selected from the group consisting of (i)-(vi).

[0560] Embodiment 169. The nucleic acid composition of embodiment 163, wherein said at least two different guide RNAs are selected from the group consisting of (vii)-(xii).

[0561] Embodiment 170. The nucleic acid composition of embodiment 163, wherein said at least two different guide RNAs comprises (1) a first guide RNA selected from the group consisting of (i)-(vi) and (2) a second guide RNA selected from the group consisting of (vii)-(xii).

### EXAMPLES

[0562] The following examples are given for the purpose of illustrating various embodiments of the disclosure and are not meant to limit the present disclosure in any fashion. The present examples, along with the methods and systems described herein, are presently representative of preferred embodiments, are exemplary, and are not intended as limitations on the scope of the disclosure. Changes therein and other uses which are encompassed within the spirit of the disclosure as defined by the scope of the claims will occur to those skilled in the art.

### Example 1. Design Prophylactic Antiviral CRISPR in huMAN Cells (PAC-MAN) as a Form of Genetic Vaccine to Target Circulating SARS-COV-2 and Potentially all Sequenced Coronaviruses

[0563] With a rapidly growing number of cases and deaths around the world caused by the coronaviruses like SARS-COV-2 and the ongoing threats of Severe Acute Respiratory Syndrome (SARS), Middle East Respiratory Syndrome (MERS), and any other coronavirus strains evolving and becoming able to suddenly transfer to humans from diverse animal hosts that act as viral reservoirs, there remains a pressing need to effectively detect and target the viral genomes for degradation to prevent the expression of viral proteins. Recent reports further showed two strains (L and S) of SARS-COV-2 with different genome sequences are circulating and likely evolving, further highlighting the need for a pan-coronavirus vaccination or treatment strategy.

[0564] The SARS-COV-2 coronavirus belongs to a family of positive-sense RNA viruses, which typically infect lung epithelial cells and upper respiratory track cells and cause respiratory disease. The SARS-COV-2 life cycle can be similar to closely related coronaviruses such as SARS. As such, the SARS-COV-2 virus can enter the cell and release the viral genome into the cytoplasm (FIG. 1A), and creates a negative-sense template strand from which viral mRNAs and a new copy of the positive sense viral genome are created. Whereas traditional vaccines work by priming the human immune system to recognize viral proteins and decrease viral entry into cells, the alternative vaccine approach proposed herein relies on recognizing and degrading the intracellular viral genome and its resulting viral mRNAs (FIG. 1B). By targeting the positive genome and viral mRNAs, the simultaneous degradation of viral genome templates for replication and inhibition of viral gene expression can limit viral packaging and spreading.

[0565] To inhibit RNA viruses in human cells, the CRISPR-Cas13d system derived from Ruminococcus flavefaciens XPD3002, a recently discovered RNA-guided RNA endonuclease, can be used. Cas13d uses CRISPR-associated RNAs (crRNAs) that contain designable 22 nucleotide (nt) spacer regions that can direct the Cas13d protein to specific RNA molecules for targeted RNA degradation. This provides a potential mechanism for targeting SARS-COV-2 for specific viral RNA genome degradation and viral gene expression inhibition. Because of its small size (2.8 kb), high specificity, and strong catalytic activity, the Cas13d can target and destroy RNA viruses including SARS-COV-2.

[0566] Described herein is a CRISPR strategy named Prophylactic Antiviral CRISPR in huMAN cells (PAC-MAN) developed as a form of genetic vaccine to target circulating SARS-COV-2 and potentially all sequenced coronaviruses. A bioinformatic pipeline defined highly conserved regions across the coronavirus genomes and flagged these regions for genome degradation and viral gene inhibition by the use of CRISPR-dCas13d. A panel of designed crRNA pools was screened against SARS-COV-2 fragments for how well the crRNAs may target conserved viral regions in order to identify the most effective crRNAs. Such pools of crRNAs can then be part of a pan-coronavirus treatment regiments.

### Example 2. High-Through Guide Design

[0567] 47 complete 2019-nCov assemblies were obtained from National Center for Biotechnology Information. All the other 3.108 Coronavirinae complete genome sequences were obtained from ViPR (Virus Pathogen Resource) database. After excluding very short genomes, a total 3150 Coronavirinae virus genomes were collected.

[0568] All the complete SARS-COV-2 genome sequences were aligned with the SARS and MERS NCBI Refseq sequences by MAFFT using the --auto flag. A consensus nucleotide (which was shared by >50% of non-gap characters at the given position) was assigned to each position in the alignment; not every position had a consensus nucleotide. The percent conservation at each position was calculated as the percentage of sequences matching the consensus at that position. To aid interpretation, the resulting plot of percentage conservation was smoothed using a moving average with a window size of 1,001 bp centered at each position. Positions corresponding to gap characters in the SARS-COV-2 reference sequence were omitted.

[0569] A comprehensive computational workflow was developed to design guide RNAs for Cas13d. In order to design all possible guides for the three pathogenic RNA viruses (2019-nCoV, MERS and SARS), first the reference genomes of SARS, MERS, SARS-COV-2, along with 47 SARS-COV-2 genomes were aligned by MAFFT using the --auto flag. Guide candidates were then identified by using a sliding window to extract all 22 bp sequences with perfect identity among the SARS-COV-2 genomes. Each guide candidate was annotated with the number of mismatches relative to the SARS and MERS genomes, as well as the GC content. 3802 guide candidates were selected with perfect match against the 47 SARS-COV-2 genomes and with <1 MERS mismatch or <1 SARS mismatch.

[0570] In addition, the vertical coverage of pooled guides was maximized so as to target a maximal set of the 3150 Coronavirinae viruses with a minimal set of guides. A sliding window was used to extract all unique 22 nt sequences in the Coronavirinae genomes, yielding 6,480,955 unique guide candidates. A hash table was used to map each guide candidate to the number of Coronavirinae genomes that it targets with a perfect match. A greedy approach was used to identify a minimal covering set of guides. In each iteration, the guides were sorted in descending order by the number of genomes targeted. The guide that targeted the most genomes was added to the minimal set of guides, and all of the genomes it targeted were removed from the hash table values. If multiple guides were tied for targeting the most genomes, the guide were ranked by the length and quantity of stretches of repeated bases, and the lowest ranking guide (i.e. the one with the fewest, shortest stretches of repeated bases) was added to the set of minimal guides. Using this approach, a set of 23 guides was identified that was able to target all 3150 Coronavirinae virus genomes (including 47 SARS-COV-2 genomes).

[0571] In order to characterize 22 nt crRNA specificity, both sets of guides were confirmed to not target any sequences in the human transcriptome. Bowtie was used to align guides to the human transcriptome (HG38; including non-coding RNA) and removed guides that mapped to the human transcriptome with fewer than 2 mismatches.

### Example 3. Computational Design and Analysis of Targetable Regions on SARS-COV-2 for High-Through Put crRNA Design

[0572] To create effective and specific crRNA sequences to target and cleave SARS-COV-2, bioinformatic analysis was performed by aligning 47 genomes of published SARS-COV-2 genomes and SARS and MERS genomes isolated from patients at the nucleotide resolution. SARS-COV-2 has a single-stranded RNA genome with ˜30,000 nucleotides which encodes 12 putative, functional open reading frames.

[0573] The bioinformatic analysis identified regions with a high conservation among 47 SARS-COV-2 genomes and genomes of SARS and MERS (FIG. 2A). The highly conserved regions contain RNA-dependent RNA polymerase (RdRP) in the polypeptide ORF1ab region, which encodes RNA-dependent RNA polNmerase that maintains the proliferation of all coronavinses, and Nucleocapsid (N) gene at the 3′ end of the genome, which encodes capsid proteins for viral packaging.

[0574] To target these two conserved regions, a collection of all 3,802 crRNAs was generated in silico based on the work-flow depicted in FIG. 5. After off-target analysis by aligning to the human transcriptome (<=1 mismatch) and ruling out poly-T sequences that may prevent crRNA expression, a collection of crRNAs was obtained (SEQ ID NO: 1-3203, 4001-7203, and 8001-11203).

[0575] 40 crRNAs were synthesized, among which 20 crRNAs targeted the conserved sequences of RdRP, and 20 crRNAs targeted N (nucleocapsid) gene (Table 1; SEQ ID NO: 12001-12040, 12101-12140, and 12201-12240) for crRNA sequences and coordinates on SARS-COV-2). These regions were targeted to avoid mutational escape from viruses and to significantly reduce both virus genome copies and viral mRNA templates for expressing essential viral proteins.

TABLE 1
Sequences of 40 crRNA targeting SARS-CoV-2

| | | | | | Target viral | | | |
|---|---|---|---|---|---|---|---|---|
| | Spacer | | | | genome | | FIG. | FIG. |
| SEQ ID | DNA | SEQ ID | Spacer RNA | SEQ ID | RNA | Target | 3A-D | 3E |
| NO | sequence | NO | sequence | NO | sequence | gene | pool | pool |
| SEQ ID | tcctgagcaaa | SEQ ID | uccugagcaaa | SEQ ID | aacacuucuuc | RdRP | G1 | F1 |
| NO: | gaagaagtgtt | NO: | gaagaaguguu | NO: | uuugcucagga | | | |
| 12001 | | 12101 | | 12201 | | | | |
| SEQ ID | tgtctgatatca | SEQ ID | ugucugauauc | SEQ ID | caacaaugugu | RdRP | G1 | |
| NO: | cacattgttg | NO: | acacauuguug | NO: | gauaucagaca | | | |
| 12002 | | 12102 | | 12202 | | | | |
| SEQ ID | tctgatcccaat | SEQ ID | ucugaucccaa | SEQ ID | uauuuuaaaua | RdRP | G1 | |
| NO: | atttaaaata | NO: | uauuuaaaaua | NO: | uugggaucaga | | | |
| 12003 | | 12103 | | 12203 | | | | |
| SEQ ID | gtctcttaacta | SEQ ID | gucucuuaacu | SEQ ID | ucuuacuuugu | RdRP | G1 | |
| NO: | caaagtaaga | NO: | acaaaguaaga | NO: | aguuaagagac | | | |
| 12004 | | 12104 | | 12204 | | | | |
| SEQ ID | ggcgtacacgt | SEQ ID | ggcguacacgu | SEQ ID | aacuuagguga | RdRP | G2 | |
| NO: | tcacctaagtt | NO: | ucaccuaaguu | NO: | acguguacgcc | | | |
| 12005 | | 12105 | | 12205 | | | | |
| SEQ ID | gattcatttgag | SEQ ID | gauucauuuga | SEQ ID | ccuacuauaac | RdRP | G2 | |
| NO: | ttatagtagg | NO: | guuauaguagg | NO: | ucaaaugaauc | | | |
| 12006 | | 12106 | | 12206 | | | | |
| SEQ ID | tacggtgcga | SEQ ID | uacggugcgag | SEQ ID | aagaauagagc | RdRP | G2 | |
| NO: | gctctattctt | NO: | cucuauucuu | NO: | ucgcaccgua | | | |
| 12007 | | 12107 | | 12207 | | | | |
| SEQ ID | gataatcccaa | SEQ ID | gauaaucccaac | SEQ ID | caccuuauggg | RdRP | G2 | |
| NO: | cccataaggtg | NO: | ccauaaggug | NO: | uugggauuauc | | | |
| 12008 | | 12108 | | 12208 | | | | |
| SEQ ID | cttgagcacac | SEQ ID | cuugagcacac | SEQ ID | uuagcuaauga | RdRP | G3 | |
| NO: | tcattagctaa | NO: | ucauuagcuaa | NO: | gugugcucaag | | | |
| 12009 | | 12109 | | 12209 | | | | |
| SEQ ID | tagcagggtca | SEQ ID | uagcaggguca | SEQ ID | guguaugcugc | RdRP | G3 | |
| NO: | gcagcataca | NO: | gcagcauacac | NO: | ugacccugcua | | | |
| 12010 | c | 12110 | | 12210 | | | | |
| SEQ ID | aaacattaaag | SEQ ID | aaacauuaaag | SEQ ID | cauugugcaaa | RdRP | G3 | |
| NO: | tttgcacaatg | NO: | uuugcacaaug | NO: | cuuuaauguuu | | | |
| 12011 | | 12111 | | 12211 | | | | |
| SEQ ID | gacaacaatta | SEQ ID | gacaacaauua | SEQ ID | uuccuaaaaac | RdRP | G3 | F1 |
| NO: | gtttttaggaa | NO: | guuuuuaggaa | NO: | uaauuguuguc | | | |
| 12012 | | 12112 | | 12212 | | | | |
| SEQ ID | atatatgtggta | SEQ ID | auauauguggu | SEQ ID | ggugacauggu | RdRP | G4 | |
| NO: | ccatgtcacc | NO: | accaugucacc | NO: | accacauauau | | | |
| 12013 | | 12113 | | 12213 | | | | |
| SEQ ID | attaccttcatc | SEQ ID | auuaccuucau | SEQ ID | aaggcauuuug | RdRP | G4 | |
| NO: | aaaatgcctt | NO: | caaaaugccuu | NO: | augaagguaau | | | |
| 12014 | | 12114 | | 12214 | | | | |
| SEQ ID | cttgattatcta | SEQ ID | cuugauuaucu | SEQ ID | guacugacauu | RdRP | G4 | |
| NO: | atgtcagtac | NO: | aaugucaguac | NO: | agauaaucaag | | | |
| 12015 | | 12115 | | 12215 | | | | |
| SEQ ID | aagaatctaca | SEQ ID | aagaaucuacaa | SEQ ID | ggaguuccugu | RdRP | G4 | F1 |
| NO: | acaggaactc | NO: | caggaacucc | NO: | uguagauucuu | | | |
| 12016 | c | 12116 | | 12216 | | | | |
| SEQ ID | atcataagtgta | SEQ ID | aucauaagugu | SEQ ID | aaaacagaugg | RdRP | G5 | F1 |
| NO: | ccatctgtttt | NO: | accaucuguuu | NO: | uacacuuauga | | | |
| 12017 | | 12117 | u | 12217 | u | | | |
| SEQ ID | agcaaaattca | SEQ ID | agcaaaauuca | SEQ ID | aaaggaccuca | RdRP | G5 | |
| NO: | tgaggtccttt | NO: | ugagguccuuu | NO: | ugaauuuugcu | | | |
| 12018 | | 12118 | | 12218 | | | | |
| SEQ ID | aacattttgctt | SEQ ID | aacauuuugcu | SEQ ID | uuuaugucuga | RdRP | G5 | |
| NO: | cagacataaa | NO: | ucagacauaaa | NO: | agcaaaauguu | | | |
| 12019 | | 12119 | | 12219 | | | | |
| SEQ ID | cactattagcat | SEQ ID | cacuauuagca | SEQ ID | acaacugcuua | RdRP | G5 | F1 |
| NO: | aagcagttgt | NO: | uaagcaguugu | NO: | ugcuaauagug | | | |
| 12020 | | 12120 | | 12220 | | | | |
| SEQ ID | tcttctttttgtcc | SEQ ID | ucuucuuuuug | SEQ ID | ccuaaaaagga | RdRP | G6 | F2 |
| NO: | tttttagg | NO: | uccuuuuuagg | NO: | caaaaagaaga | | | |
| 12021 | | 12121 | | 12221 | | | | |
| SEQ ID | gaatgttttgtat | SEQ ID | gaauguuuugu | SEQ ID | uauugacgcau | RdRP | G6 | |
| NO: | gcgtcaata | NO: | augcgucaaua | NO: | acaaaacauuc | | | |
| 12022 | | 12122 | | 12222 | | | | |
| SEQ ID | tttggatctttgt | SEQ ID | uuuggaucuuu | SEQ ID | aauuggaugac | RdRP | G6 | |
| NO: | catccaatt | NO: | gucauccaauu | NO: | aaagauccaaa | | | |
| 12023 | | 12123 | | 12223 | | | | |
| SEQ ID | ccacgttcccg | SEQ ID | ccacguucccg | SEQ ID | agucacaccuu | RdRP | G6 | |
| NO: | aaggtgtgact | NO: | aaggugugacu | NO: | cgggaacgugg | | | |
| 12024 | | 12124 | | 12224 | | | | |
| SEQ ID | aaattgtgcaat | SEQ ID | aaauugugcaa | SEQ ID | uuggccgcaaa | N | G7 | F2 |
| NO: | ttgcggccaa | NO: | uuugcggccaa | NO: | uugcacaauuu | | | |
| 12025 | | 12125 | | 12225 | | | | |
| SEQ ID | aatcagttcctt | SEQ ID | aaucaguuccu | SEQ ID | cuaaucagaca | N | G7 | |
| NO: | gtctgattag | NO: | ugucugauuag | NO: | aggaacugauu | | | |
| 12026 | | 12126 | | 12226 | | | | |
| SEQ ID | cttgggtttgtt | SEQ ID | cuuggguuugu | SEQ ID | cgugguccaga | N | G7 | |
| NO: | ctggaccacg | NO: | ucuggaccacg | NO: | acaaacccaag | | | |
| 12027 | | 12127 | | 12227 | | | | |
| SEQ ID | gtggcagtac | SEQ ID | guggcaguacg | SEQ ID | cucggcaaaaa | N | G7 | |
| NO: | gtttttgccgag | NO: | uuuuugccgag | NO: | cguacugccac | | | |
| 12028 | | 12128 | | 12228 | | | | |
| SEQ ID | gcctcagcag | SEQ ID | gccucagcagc | SEQ ID | cuaagaaaucu | N | G8 | |
| NO: | cagatttcttag | NO: | agauuucuuag | NO: | gcugcugaggc | | | |
| 12029 | | 12129 | | 12229 | | | | |
| SEQ ID | gttgttgttggc | SEQ ID | guaguuguug | SEQ ID | ucagguaaagg | N | G8 | F2 |
| NO: | ctttaccaga | NO: | gccuuuaccag | NO: | ccaacaacaac | | | |
| 12030 | | 12130 | a | 12230 | | | | |
| SEQ ID | gcctggagttg | SEQ ID | gccuggaguug | SEQ ID | uucaagaaauu | N | G8 | |
| NO: | aatttcttgaa | NO: | aauuucuugaa | NO: | caacuccaggc | | | |
| 12031 | | 12131 | | 12231 | | | | |
| SEQ ID | gaagaggctt | SEQ ID | gaagaggcuug | SEQ ID | gaggcggcagu | N | G8 | |
| NO: | gactgccgcct | NO: | acugccgccuc | NO: | caagccucuuc | | | |
| 12032 | c | 12132 | | 12232 | | | | |
| SEQ ID | ttttggcaatgtt | SEQ ID | uuuuggcaaug | SEQ ID | ucaaggaacaa | N | G9 | |
| NO: | gttccttga | NO: | uuguuccuuga | NO: | cauugccaaaa | | | |
| 12033 | | 12133 | | 12233 | | | | |
| SEQ ID | aggattgcgg | SEQ ID | aggauugcggg | SEQ ID | ucacauuggca | N | G9 | |
| NO: | gtgccaatgtg | NO: | ugccaauguga | NO: | cccgcaauccu | | | |
| 12034 | a | 12134 | | 12234 | | | | |
| SEQ ID | aggctccctca | SEQ ID | aggcucccuca | SEQ ID | uggguugcaac | N | G9 | F2 |
| NO: | gttgcaaccca | NO: | guugcaaccca | NO: | ugagggagccu | | | |
| 12035 | | 12135 | | 12235 | | | | |
| SEQ ID | ggtagctcttc | SEQ ID | gguagcucuuc | SEQ ID | uggcuacuacc | N | G9 | |
| NO: | ggtagtagcca | NO: | gguaguagcca | NO: | gaagagcuacc | | | |
| 12036 | | 12136 | | 12236 | | | | |
| SEQ ID | aacgccttgtc | SEQ ID | aacgccuuguc | SEQ ID | anucccucgag | N | G10 | |
| NO: | ctcgagggaat | NO: | cucgagggaau | NO: | gacaaggcguu | | | |
| 12037 | | 12137 | | 12237 | | | | |
| SEQ ID | tgaaccaaga | SEQ ID | ugaaccaagac | SEQ ID | aauaauacagc | N | G10 | |
| NO: | cgcagtattatt | NO: | gcaguauuauu | NO: | gucuugguuca | | | |
| 12038 | | 12138 | | 12238 | | | | |
| SEQ ID | ccccactgcgt | SEQ ID | ccccacugcgu | SEQ ID | cagaauggaga | N | G10 | |
| NO: | tctccattctg | NO: | ucuccauucug | NO: | acgcagugggg | | | |
| 12039 | | 12139 | | 12239 | | | | |
| SEQ ID | ttgaatctgag | SEQ ID | uagaaucugag | SEQ ID | uuugguggacc | N | G10 | F2 |
| NO: | ggtccaccaa | NO: | gguccaccaaa | NO: | cucagauucaa | | | |
| 12040 | a | 12140 | | 12240 | | | | |

### Example 4. Cas13d PAC-MAN is Capable of Inhibiting Coronavirus Fragment Expression in Human Lung Epithelial Cells

[0576] The crRNA plasmids were cloned using standard restriction-ligation cloning. Forward and reverse oligos for each spacer were annealed and inserted into backbone using T4 DNA Ligase (NEB). Assembled oligos were either inserted into a pHR or pUC 19 backbone, obtained and modified from Addgene (#121514 and #109054, respectively). Spacer sequences for all crRNAs can be found in Table 1.

[0577] To clone SARS-COV-2 reporters, pHR-PGK-scFv GCN4-sfGFP (pSLQ1711) was digested with EcoR1 and SKf1 and gel purified. The PGK promoter and sfGFP were PCR amplified from pSLQ1711 and gel purified. The COV1 and COV2 fragments were synthesize from Integrated DNA Technologies. At last, the PGK, sfGFP, and COV1/COV2 fragment were ligated into the linearized pSLQ1711 vector.

[0578] At day 1, one confluent 100 mm dish of HEK293T cells were seeded into three 150 mm dish format. At day 2, cells were ˜50-70% confluent at the time of transfection. For each dish, 27.18 μg of pHR vector containing the construct of interest, 23.76 μg of dR8.91 and 2.97 μg of pMD2.G were mixed in 4.5 mL of Opti-MEM reduced serum media with 150 μL of Mirus TransIT-LT1 reagent and incubated at room temperature for 30 minutes. The transfection complex solution was distributed evenly to HEK293T cultures dropwise. At day 5, lentiviruses were harvested from the supernatant with a sterile syringe and filtered through a 0.22-μm polyvinylidene fluoride filter.

[0579] For A549 cells, lentivirus precipitation solution was added and precipitated as per the manufacturer's protocol. One well of a 6-well plate of A549 cells at ˜50% confluency were transduced with the precipitated lentivirus. After 2-3 days of growth, the cell supernatant containing virus was removed and the cells were expanded. Cells were then sorted for mCherry+ cells using a cell sorter.

[0580] To evaluate whether Cas13d was effective for targeting SARS-COV-2 sequences, two reporters expressing were created based on synthesized fragments of SARS-COV-2 fused to GFP (FIG. 2B: SARS-COV-2-F1 and SARS-COV-2-F2; and Table 2 (SEQ ID NO: 12251 and 12252) for SARS-COV-2 fragment sequences) for designing and testing effectiveness of the crRNAs. SARS-COV-2 infects mainly respiratory tract cells in patients; therefore, human lung epithelial A549 cells were chosen as the model cell line. A stable A549 cell line were created to express Cas13d through lentiviral transduction, followed by sorting for the mCherry marker that was co-expressed with Cas13d (FIG. 2C). The crRNAs were expressed from a U6 promoter.

TABLE 2
Synthesized SARS-COV-2 fragment sequences

(A) SARS-CoV-2-F1 reporter, SEQ ID NO: 12251
cttcagtcagctgatgcacaatcgtttttaaacgggtttgcggtgtaagtgcagcccgtcttacaccgtgcggcacaggcactagtac
tgatgtcgtatacagggcttttgacatctacaatgataaagtagctggttttgctaaattcctaaaaactaattgttgtcgcttccaagaaa
aggacgaagatgacaatttaattgattcttactttgtagttaagagacacactttctctaactaccaacatgaagaaacaatttataattta
cttaaggattgtccagctgttgctaaacatgacttctttaagtttagaatagacggtgacatggtaccacatatatcacgtcaacgtctta
ctaaatacacaatggcagacctcgtctatgctttaaggcattttgatgaaggtaattgtgacacattaaaagaaatacttgtcacataca
attgttgtgatgatgattatttcaataaaaaggactggtatgattttgtagaaaacccagatatattacgcgtatacgccaacttaggtga
acgtgtacgccaagctttgttaaaaacagtacaattctgtgatgccatgcgaaatgctggtattgttggtgtactgacattagataatca
agatctcaatggtaactggtatgatttcggtgatttcatacaaaccacgccaggtagtggagttcctgttgtagattcttattattcattgtt
aatgcctatattaaccttgaccagggctttaactgcagagtcacatgttgacactgacttaacaaagccttacattaagtgggatttgtt
aaaatatgacttcacggaagagaggttaaaactctttgaccgttattttaaatattgggatcagacataccacccaaattgtgttaactgt
ttggatgacagatgcattctgcattgtgcaaactttaatgttttattctctacagtgttcccacctacaagttttggaccactagtgagaaa
aatatttgttgatggtgttccatttgtagtttcaactggataccacttcagagagctaggtgttgtacataatcaggatgtaaacttacata
gctctagacttagttttaaggaattacttgtgtatgctgctgaccctgctatgcacgctgcttctggtaatctattactagataaacgcact
acgtgcttttcagtagctgcacttactaacaatgttgcttttcaaactgtcaaacccggtaattttaacaaagacttctatgactttgctgtg
tctaagggtttctttaaggaaggaagttctgttgaattaaaacacttcttctttgctcaggatggtaatgctgctatcagcgattatgacta
ctatcgttataatctaccaacaatgtgtgatatcagacaactactatttgtagttgaagttgttgataagtactttgattgttacgatggtgg
ctgtattaatgctaaccaagtcatcgtcaacaacctagacaaatcagctggttttccatttaataaatggggtaaggctagactttattat
gattcaatgagttatgaggatcaagatgcacttttcgcatatacaaaacgtaatgtcatccctactataactcaaatgaatcttaagtatg
ccattagtgcaaagaatagagctcgcaccgtagctggtgtctctatctgtagtactatgaccaatagacagtttcatcaaaaattattga
aatcaatagccgccactagaggagctactgtagtaattggaacaagcaaattctatggiggttggcacaacatgttaaaaactgtttat
agtgatgtagaaaaccctcaccttatgggttgggattatcctaaatgtgatagagccatgcctaacatgcttagaattatggcctcactt
gttcttgctcgcaaacatacaacgtgttgtagcttgtcacaccgtttctatagattagctaatgagtgtgctcaagtattgagtgaa
(B) SARS-CoV-2-F2 reporter (lower case = RRP2, upper case = N), SEQ ID NO: 12252
atggtcatgtgtggcggttcactatatgttaaaccaggtggaacctcatcaggagatgccacaactgcttatgctaatagtgtttttaac
atttgtcaagctgtcacggccaatgttaatgcacttttatctactgatggtaacaaaattgccgataagtatgtccgcaatttacaacaca
gactttatgagtgtctctatagaaatagagatgttgacacagactttgtgaatgagttttacgcatatttgcgtaaacatttctcaatgatg
atactctctgacgatgctgttgtgtgtttcaatagcacttatgcatctcaaggtctagtggctagcataaagaactttaagtcagttctttat
tatcaaaacaatgtttttatgtctgaagcaaaatgttggactgagactgaccttactaaaggacctcatgaattttgctctcaacatacaa
tgctagttaaacagggtgatgattatgtgtaccttccttacccagatccatcaagaatcctaggggccggctgttttgtagatgatatcg
taaaaacagatggtacacttatgattgaacggttcgtgtctttagctatagatgcttacccacttactaaacatcctaatcaggagtatgc
tgatgtctttcatttgtacttacaatacataagaaagctacatgatgagttaacaggacacatgttagacatgtattctgttatgcttactaa
tgataacacttcaaggtattgggaacctgagttttatgTCTGATAATGGACCCCAAAATCAGCGAAATG
CACCCCGCATTACGTTTGGTGGACCCTCAGATTCAACTGGCAGTAACCAGAAT
GGAGAACGCAGTGGGGCGCGATCAAAACAACGTCGGCCCCAAGGTTTACCCA
ATAATACTGCGTCTTGGTTCACCGCTCTCACTCAACATGGCAAGGAAGACCTTA
AATTCCCTCGAGGACAAGGCGTTCCAATTAACACCAATAGCAGTCCAGATGAC
CAAATTGGCTACTACCGAAGAGCTACCAGACGAATTCGTGGTGGTGACGGTAA
AATGAAAGATCTCAGTCCAAGATGGTATTTCTACTACCTAGGAACTGGGCCAG
AAGCTGGACTTCCCTATGGTGCTAACAAAGACGGCATCATATGGGTTGCAACT
GAGGGAGCCTTGAATACACCAAAAGATCACATTGGCACCCGCAATCCTGCTAA
CAATGCTGCAATCGTGCTACAACTTCCTCAAGGAACAACATTGCCAAAAGGCT
TCTACGCAGAAGGGAGCAGAGGCGGCAGTCAAGCCTCTTCTCGTTCCTCATCA
CGTAGTCGCAACAGTTCAAGAAATTCAACTCCAGGCAGCAGTAGGGGAACTTO
TCCTGCTAGAATGGCTGGCAATGGCGGTGATGCTGCTCTTGCTTTGCTGCTGCT
TGACAGATTGAACCAGCTTGAGAGCAAAATGTCTGGTAAAGGCCAACAACAAC
AAGGCCAAACTGTCACTAAGAAATCTGCTGCTGAGGCTTCTAAGAAGCCTCGG
CAAAAACGTACTGCCACTAAAGCATACAATGTAACACAAGCTTTCGGCAGACG
TGGTCCAGAACAAACCCAAGGAAATTTTGGGGACCAGGAACTAATCAGACAA
GGAACTGATTACAAACATTGGCCGCAAATTGCACAATTTGCCCCCAGCGCTTC
AGCGTTCTTCGGAATGTCGCGCATTGGCATGGAAGTCACACCTTCGGGAACGT
GGTTGACCTACACAGGTGCCATCAAATTGGATGACAAAGATCCAAATTTCAAA
GATCAAGTCATTTTGCTGAATAAGCATATTGACGCATACAAAACATTCCCACC
AACAGAGCCTAAAAAGGACAAAAAGAAGAAGGCTGATGAAACTCAAGCCITA
CCGCAGAGACAGAAGAAACAGCAAACTGTGACTCTTCTTCCTGCTGCAGATTT
GGATGATTTCTCCAAACAATTGCAACAATCCATGAGCAGTGCTGACTCAACTC
AGGCC

[0581] Regions of the SARS-COV-2 fragments were investigated to determine which were more susceptible to Cas13d-mediated targeting and cleavage. To do this, the SARS-COV-2 reporters were introduced into Cas13d A549 cells that had been transduced with pools of four crRNAs tiling adjacent SARS-COV-2 sequences targeting either RdRP or N (FIG. 2D). Pools of crRNAs were chosen to be evaluated to prevent live virus from escaping inhibition by mutating a single crRNA target site. A total of ten groups were tested for a combination of any one of SEQ ID NO: 12001-12040, 12101-12140, and 12201-12240. Twenty-four hours after SARS-COV-2 reporter transfection, flow cytometry analysis was performed to examine levels of GFP protein expression on single cell level and collected RNA from cells to perform quantitative real-time PCR (qRT-PCR) to examine mRNA transcript abundance.

### Example 5. SARS-CoV-2 Reporter Challenge Experiments

[0582] On day 1, cells were seeded at 60k cells per well of 12-well plate. On day 2, cells were transduced with pooled crRNAs. On day 3, cells were switched to fresh medium with puromycin at 2 μg/mL. 24 hours after puromycin selection, cells with crRNAs were challenged with SARS-COV-2 plasmids or SARS-COV-2 lentivirus. 24 hours after transfection or 48 hours after transduction, cells were tested by Flow cytometry and qRT-PCR.

[0583] Alternatively on day 0, 30,000 wild type (wt) A549 cells and 30,000 A549 cells stably expressing CasRx (hereafter referred to as CasRx A549) were plated in 24-well plates. On day 1, CasRx A549 cells were transfected with two pool of five guides targeting the two SARS-COV-2 reporters or a non-targeting guide along with the respective SARS-COV-2 reporters in an equimolar ratio using Mirus LT1 reagent (50 μL Opti-MEM reduced serum media, 0.136 μg guide pool, 0.364 μg SARS-COV-2 reporter, 1 μL Mirus LT1 per well). Wt cells were transfected with either the guide pools or reporter plasmids as compensation controls. Knockdown of GFP was measured on day 3 by flow cytometry.

[0584] For transduction of SARS-COV-2 reporter plasmid, on day 0, LentiX HEK cells were seeded to 1:6 from a 100 mm dish in a 150 mm dish. The following day, HEK cells were transfected with 27.18 μg of SARS-COV-2 reporter, 23.76 μg of dR8.91 and 2.97 μg of pMD2.G in 4.5 mL of Opti-MEM reduced serum media with 150 μL of Mirus TransIT-LT1 reagent. 30,000 CasRx A549 and wt A549 cells were also seeded in 24-well plates. On day 2, A549 cells were transfected with either pools of targeting guides or a non-targeting guide (50 μL Opti-MEM reduced serum media, 0.5 μg guide pool, 1 μL Mirus LT1 per well). On day 3, lentiviruses were harvested from the supernatant with a sterile syringe and filtered through a 0.22-μm polyvinylidene fluoride filter and precipitated with lentivirus precipitation solution and resuspended in 7 mL DMEM media. The media on the cells was replaced with either fresh media for the compensation controls or 0.5 mL virus-containing media at the following dilutions for the experimental conditions: undiluted, ½ dilution, ⅓ dilution, and ¼ dilution. On day 4, the media on all the cells was replaced with 0.5 mL fresh DMEM. On day 5, cells were measured by flow cytometry and assessed for GFP knockdown.

[0585] Real-time qRT-PCR was performed to determine the mRNA expression change of coronavirus fragment. For each sample, total RNA was isolated by using the RNeasy Plus Mini Kit, followed by cDNA synthesis using the iScript cDNA Synthesis Kit. Quantitative PCR was performed using the PrimePCR assay with the SYBR Green Master Mix, and run on a Biorad CFX384 real-time system, according to manufacturers' instructions. Cq values were used to quantify mRNA expression. The relative expression of the coronavirus fragments was normalized to a GAPDH internal control. Primers were ordered from Integrated DNA Technologies (IDT).

[0586] Microscopy for SARS-COV-2 experiments was performed on An inverted confocal microscope equipped with an Andor iXon Ultra-897 EM-CCD camera and 405 nm, 488 nm. 561 nm and 642 nm lasers, using the 20×PLAN APO air objective (NA=0.75). Image were taken using NIS Elements version 4.60 software. Microscopy for IAV experiments was performed on a Keyence BZ-X810 microscope equipped with a GFP and Texas Red filter was used to obtain images with a 20× objective lens.

[0587] For flow cytometry experiments, cells were washed with 1×PBS, treated with 1×Trypsin EDTA, and fixed in 1.6% PFA (final) for 10 minutes. Cells were washed with FACS buffer (1×PBS, 0.3% BSA, 1 mM EDTA). BD Accuri C6 plus flow cytometer was used to collect raw data. Raw data was processed with Cytobank software.

[0588] For guide preparation, T7 promoter dsDNA templates were prepared by annealing and PCR extension an upper oligo carrying the T7 promoter and RfxCas13d crRNA repeat with the bottom oligos which have an overlap of 16 bp with the upper oligo and the anti-sense crRNA spacer sequence. The templates were in vitro transcribed with the TranscriptAid T7 High Yield Transcription Kit at 37° C. overnight. Guide RNAs were purified with Monarch RNA Cleanup Kit and frozen at −80° C. For the preparation of the two GFP-Cov ssRNA template, a T7 promoter was added to the 5′ end of the dsDNA templates by PCR amplification. The PCR templates were then used for in vitro transcription and the RNA templates were purified as the production of the guides.

[0589] Purified RfxCas13d protein and guide RNA were mixed at 1:1 molar ratio in RNA Cleavage Buffer (25 mM Tris pH 7.5, 15 mM Tris pH 7.0, 1 mM DTT, 6 mM MgCl2). The reaction was prepared on ice and incubated at 37° C. for 15 minutes prior to the addition of target at 1:2 molar ratio relative to RfxCas13d. The reaction was subsequently incubated at 37° C. for 45 minutes and quenched with 0.2 ul Proteinase K (10 mg/mL) at 65° C. for 15 minutes. The reaction was then denatured with 2×RNA loading buffer), at 85° C. for 10 minutes, and separated on a fresh-made 1% agarose gel. Gels were stained with SYBR safe and imaged via the Gel imaging system.

[0590] Compared to reporter only controls, most RdRP-targeting crRNA pools were able to repress reporter expression to some extent, and one pool targeting the middle of the SARS-COV-2-F1 RdRP region (Group 4; SARS-COV-2 genome coordinates 13,784-14149) was able to repress GFP by 86% (p=0.0003) (FIG. 3A, FIGS. 6A-B, and Table 3). One pool of N-targeting crRNAs (Group 8) was able to substantially repress SARS-COV-2-F2 GFP, causing a 71% decrease in expression (p=2×10⁻⁷, FIG. 3B, FIGS. 6A-B, and Table 3). The qRT-PCR analysis showed consistent results at the RNA level, with RdRP-targeting Group 4 inhibiting SARS-COV-2-F1 mRNA abundance by 83% (p=3×10⁻¹¹) and B-targeting Group 8 inhibiting SARS-COV-2-F2 mRNA abundance by 79% (p=2×10⁻¹²) (FIG. 3A, FIG. 3D, and Table 3). The variations in the ability of different crRNA pools to repress the SARS-COV-2 reporters may due to RNA secondary structure inherent in the SARS-COV-2 genome or differences in binding affinities for each crRNA sequence system.

TABLE 3
P values for crRNA screens in FIG. 3A and FIG. 3B

| | | |
|---|---|---|
| crRNA pools | Experiment | P value |

FIG. 3A

| | | |
|---|---|---|
| G1 | GFP expression | 5.41E−05 |
| G2 | GFP expression | 4.70E−05 |
| G3 | GFP expression | 1.66E−05 |
| G4 | GFP expression | 2.37E−06 |
| G1 | mRNA abundance | 4.88E−09 |
| G2 | mRNA abundance | 2.21E−09 |
| G3 | mRNA abundance | 8.13E−10 |
| G4 | mRNA abundance | 3.67E−11 |

FIG. 3B

| | | |
|---|---|---|
| G5 | GFP expression | 1.70E−04 |
| G6 | GFP expression | 3.40E−03 |
| G7 | GFP expression | 5.06E−01 |
| G8 | GFP expression | 2.37E−07 |
| G9 | GFP expression | 4.83E−05 |
| G10 | GFP expression | 8.66E−06 |
| G5 | mRNA abundance | 1.01E−10 |
| G6 | mRNA abundance | 4.47E−07 |
| G7 | mRNA abundance | 5.54E−04 |
| G8 | mRNA abundance | 1.52E−12 |
| G9 | mRNA abundance | 1.35E−05 |
| G10 | mRNA abundance | 3.51E−05 |

[0591] Next, the performance of RdRP-targeting adjacent crRNA pools was validated when SARS-COV-2-F1 was introduced via lentiviral transduction. This approach, in which the lentivirus-derived RNA serves as a PAC-MAN target prior to lentivirus integration into DNA, mimicked the crRNA targeting conditions that would apply for natural COVID-19 infection. A few selected crRNA pools, including the 3 best groups G4, G5, and G8 and one less efficient group G1, were tested with a lentiviral multiplicity of infection (MOI) of 0.5. The results revealed similar patterns to SARS-CoV-2 transfection experiments, with the best groups (G4, G5, G8) able to repress their reporters by 69%, 71%, and 60% (p=7×10⁻⁶, 10⁻³, 3×10⁻⁶ for G4, G5, G8, respectively, FIG. 3C). qRT-PCR analysis also showed consistent results, with G4, G5, and G8 repressing 70%, 68%, and 49% of RNA abundance (p=8×10⁻⁸, 4×10⁻⁶, 10⁻⁴ for G4, G5, G8 respectively, FIG. 3D).

[0592] The effectiveness of Cas13d-mediated repression of SARS-COV-2 reporters was further validated by co-transfecting each reporter with a pool of 5 crRNAs tiled along the whole fragment, compared to a pool of 5 non-targeting control crRNAs (Table 1). It was found that the RdRP-targeting crRNAs were able to repress SARS-COV-2-F1 GFP by 81% (p=0.01), while B-targeting crRNAs were able to repress SARS-COV-2-F2 GFP by 90% (p=5×10⁻⁴, FIG. 3E and FIG. 7A). An analysis of the extent to which expression of Cas13d or crRNAs affected SARS-CoV-2 GFP reporter inhibition. The analysis revealed that SARS-CoV-2 inhibition was more sensitive to crRNA concentration in the samples, while lower Cas13d expression only moderately decreased inhibitory activity (FIG. 7B). Thus, maintaining a high level of crRNA concentration is likely a determining factor for more effective SARS-CoV-2 sequence targeting and cleavage. These data together demonstrated: 1) Cas13d PAC-MAN can be an effective system to target and degrade SARS-CoV-2 sequences in human cells and; 2) proper design of crRNAs are important for obtaining a high efficiency of SARS-CoV-2 inhibition.

### Example 6. Cas13d PAC-MAN May be a Pan-Coronavirus Inhibition Strategy

[0593] In the past two decades, multiple variants of coronavirus including SARS-COV-2, SARS and MERS emerged from animal reservoirs into humans, each time causing significant fatalities. It may be greatly beneficial to design a strategy that can target and prevent broad viral threats including those that currently reside in animals. As such, a minimal number of crRNAs that may target a majority of known coronaviruses found in both humans and animals was designed.

[0594] To do this, all known coronavirus genomes (3,150) was analyzed to identify all possible crRNAs that may target each of those genomes, ending up with approximately 6.48 million possible crRNAs (FIG. 4A and FIG. 8). The crRNAs were then narrowed down to define what was the lowest number of crRNAs that may target all known coronavirus genomes with zero mismatches. It was found that just two crRNAs may target ˜50% of coronavirus genomes including SARS-COV-2, SARS and MERS, 6 crRNAs were able to target ˜91% of coronavirus genomes, and 22 crRNAs may cover all known coronaviruses with no mismatches (FIG. 4B and Table 4). The ability to use a small number of crRNAs to possibly target broad strains of coronaviruses further highlighted the uniqueness of approach disclosed herein in contrast to traditional pharmaceutical or vaccination approaches.

[0595] Referring to FIG. 4A, about 3,150 coronavirus genomes are depicted in a pie chart 400. The coronavirus genomes are first grouped into the following four coronavirus (CoV) group: alphacoronavirus 410, betacoronavirus 412, deltacoronavirus 414, and gammacoronavirus 416. The inner region of the pie chart 400 indicates the respective CoV type of each genome. The pie chart 400 is surrounded by an inner ring to indicate which crRNAs of the top 6 pan-coronavirus crRNAs can bind (or target) each coronavirus genome. The top 6 pan-coronavirus crRNAs include: crRNA 420 (SEQ ID NO: 13101), crRNA 422 (SEQ ID NO: 13102), crRNA 424 (SEQ ID NO: 13103), crRNA 426 (SEQ ID NO: 13104), crRNA 428 (SEQ ID NO: 13105), and crRNA 430 (SEQ ID NO: 13106). Furthermore, the pie chart 400 is further surrounded by an outer ring to indicate the genomes that correspond to one of the three human coronaviruses: (1) MERS-CoV and SARS-CoV 440, (2) COV 229E, COV NL63, COV OC43, and COV HKU1 442, and (3) SARS-CoV-2 444.

TABLE 4
Sequences of predicted 22 crRNA targeting all coronaviruses with the
top 6 crRNA covering 91% of coronaviruses including all published
SARS-CoV-2 strains

| | | | | | Target viral |
|---|---|---|---|---|---|
| SEQ ID | Spacer DNA | SEQ ID | Spacer RNA | SEQ ID | genome RNA |
| NO | sequence | NO | sequence | NO | sequence |
| SEQ ID | TGAACCAAG | SEQ ID | UGAACCAAGA | SEQ ID | AAUAAUACUG |
| NO: | ACGCAGTATT | NO: | CGCAGUAUUA | NO: | CGUCUUGGUU |
| 13001 | ATT | 13101 | UU | 13201 | CA |
| SEQ ID | TTATCTTCAT | SEQ ID | UUAUCUUCAU | SEQ ID | ACUGGAAUUU |
| NO: | GTGTGTTAAC | NO: | GUGUGUUAAC | NO: | CACAUGGAAU |
| 13002 | TG | 13102 | UG | 13202 | AU |
| SEQ ID | CAAGCACAA | SEQ ID | CAAGCACAAC | SEQ ID | AGACCUGAAG |
| NO: | CCCATCAAAT | NO: | CCAUCAAAUU | NO: | GUUGCGUUGU |
| 13003 | TGG | 13103 | GG | 13203 | AA |
| SEQ ID | GATAGTATAG | SEQ ID | GAUAGUAUA | SEQ ID | AGGGUUGUGG |
| NO: | TGTTCCATCA | NO: | GUGUUCCAUC | NO: | UCUUUUUAAA |
| 13004 | TA | 13104 | AUA | 13204 | GA |
| SEQ ID | TGCTGTATAT | SEQ ID | UGCUGUAUAU | SEQ ID | AGUAUUAUUC |
| NO: | CAATACAGTA | NO: | CAAUACAGUA | NO: | AGGCAGUGCU |
| 13005 | TG | 13105 | UG | 13205 | UC |
| SEQ ID | AGCGCACTAT | SEQ ID | AGCGCACUAU | SEQ ID | CAAGGAUAGU |
| NO: | TGTAACAAGT | NO: | UGUAACAAGU | NO: | AUACCUGUGG |
| 13006 | AG | 13106 | AG | 13206 | UG |
| SEQ ID | ATATTCCATG | SEQ ID | AUAUUCCAUG | SEQ ID | CACAGAAUGC |
| NO: | TGAAATTCCA | NO: | UGAAAUUCCA | NO: | UGAGUCCCUG |
| 13007 | GT | 13107 | GU | 13207 | UC |
| SEQ ID | TTACAACGCA | SEQ ID | UUACAACGCA | SEQ ID | CACUGGAUGC |
| NO: | ACCTTCAGGT | NO: | ACCUUCAGGU | NO: | CAUUAUAGUU |
| 13008 | CT | 13108 | CU | 13208 | GA |
| SEQ ID | TCTTTAAAAA | SEQ ID | UCUUUAAAAA | SEQ ID | CAGGCUAUUA |
| NO: | GACCACAACC | NO: | GACCACAACC | NO: | ACUCUUCAUU |
| 13009 | CT | 13109 | CU | 13209 | GU |
| SEQ ID | GAAGCACTGC | SEQ ID | GAAGCACUGC | SEQ ID | CAGUUAACAC |
| NO: | CTGAATAATA | NO: | CUGAAUAAUA | NO: | ACAUGAAGAU |
| 13010 | CT | 13110 | CU | 13210 | AA |
| SEQ ID | CACCACAGGT | SEQ ID | CACCACAGGU | SEQ ID | CAUACUGUAU |
| NO: | ATACTATCCT | NO: | AUACUAUCCU | NO: | UGAUAUACAG |
| 13011 | TG | 13111 | UG | 13211 | CA |
| SEQ ID | GACAGGGAC | SEQ ID | GACAGGGACU | SEQ ID | CAUCCUUAGU |
| NO: | TCAGCATTCT | NO: | CAGCAUUCUG | NO: | GGCAAGUUUU |
| 13012 | GTG | 13112 | UG | 13212 | CU |
| SEQ ID | TCAACTATAA | SEQ ID | UCAACUAUAA | SEQ ID | CCAAUUUGAU |
| NO: | TGGCATCCAG | NO: | UGGCAUCCAG | NO: | GGGUUGUGCU |
| 13013 | TG | 13113 | UG | 13213 | UG |
| SEQ ID | ACAATGAAG | SEQ ID | ACAAUGAAGA | SEQ ID | CUACUUGUUJA |
| NO: | AGTTAATAGC | NO: | GUUAAUAGCC | NO: | CAAUAGUGCG |
| 13014 | CTG | 13114 | UG | 13214 | CU |
| SEQ ID | AGAAAACTTG | SEQ ID | AGAAAACUUG | SEQ ID | CUCACAUAAU |
| NO: | CCACTAAGGA | NO: | CCACUAAGGA | NO: | GUUCAGCCAU |
| 13015 | TG | 13115 | UG | 13215 | UG |
| SEQ ID | CAATGGCTGA | SEQ ID | CAAUGGCUGA | SEQ ID | GACAUUGCCA |
| NO: | ACATTATGTG | NO: | ACAUUAUGUG | NO: | CGUGUAUGCG |
| 13016 | AG | 13116 | AG | 13216 | UG |
| SEQ ID | CACGCATACA | SEQ ID | CACGCAUACA | SEQ ID | GAUGCUGUUA |
| NO: | CGTGGCAATG | NO: | CGUGGCAAUG | NO: | AUAAUGGUUC |
| 13017 | TC | 13117 | UC | 13217 | UC |
| SEQ ID | GAGAACCATT | SEQ ID | GAGAACCAUU | SEQ ID | UAGAUAAUCA |
| NO: | ATTAACAGCA | NO: | AUUAACAGCA | NO: | GGAUCUUAAU |
| 13018 | TC | 13118 | UC | 13218 | GG |
| SEQ ID | CCATTAAGAT | SEQ ID | CCAUUAAGAU | SEQ ID | UAUGAUGGAA |
| NO: | CCTGATTATC | NO: | CCUGAUUAUC | NO: | CACUAUACUA |
| 13019 | TA | 13119 | UA | 13219 | UC |
| SEQ ID | ATAGTAATGC | SEQ ID | AUAGUAAUGC | SEQ ID | UAUGCAUUGU |
| NO: | ATACAATGCA | NO: | AUACAAUGCA | NO: | AUGCAUUACU |
| 13020 | TA | 13120 | UA | 13220 | AU |
| SEQ ID | CGACCATAAC | SEQ ID | CGACCAUAAC | SEQ ID | UGGCUAUUGA |
| NO: | CATCAATAGC | NO: | CAUCAAUAGC | NO: | UGGUUAUGGU |
| 13021 | CA | 13121 | CA | 13221 | CG |
| SEQ ID | CAACATACTA | SEQ ID | CAACAUACUA | SEQ ID | UUUUAAUGAC |
| NO: | TTGTCATTAA | NO: | UUGUCAUUAA | NO: | AAUAGUAUGU |
| 13022 | AA | 13122 | AA | 13222 | UG |

[0596] As a map was provided to show how each of the top 6 crRNAs (PAC-MAN-T6) targeted various parts of the coronavirus phylogenetic tree (FIG. 4A, middle box denoted with PAC-MAN-Top 6 Pan-coronavirus crRNAs). Beta coronaviruses, the genus of SARS-COV-2, SARS, and MERS, were mostly covered by 3 crRNAs (crRNA 1-3), while the other genera were covered by these three plus the remaining 3 crRNAs. Altogether, the PAC-MAN-T6 can target all known human coronavirus with broad coverage against other animal coronaviruses. Table 5 illustrates the cumulative of percentage of SARS-COV-2 genomes being targeted with each additional targeting by the 22 crRNA targeting coronavirus as described herein.

TABLE 5
Percentage of Pan-coronavirus targeted with PAC-MAN crRNAs.

| | % of | |
|---|---|---|
| Number | Targeted | |
| of | CoV | |
| crRNAs | Genomes | crRNA list in the category |
| 1 | 12.28% | SEQ ID NO: 13101 |
| 2 | 51.09% | SEQ ID NO: 13101; SEQ ID NO: 13102 |
| 3 | 67.15% | SEQ ID NO: 13101; SEQ ID NO: 13102; SEQ ID NO: 13103 |
| 4 | 81.12% | SEQ ID NO: 13101; SEQ ID NO: 13102; SEQ ID NO: 13103; SEQ |
| | | ID NO: 13104 |
| 5 | 86.51% | SEQ ID NO: 13101; SEQ ID NO: 13102; SEQ ID NO: 13103; SEQ |
| | | ID NO: 13104; SEQ ID NO: 13105 |
| 6 | 90.61% | SEQ ID NO: 13101; SEQ ID NO: 13102; SEQ ID NO: 13103; SEQ |
| | | ID NO: 13104; SEQ ID NO: 13105; SEQ ID NO: 13106 |
| 7 | 93.15% | SEQ ID NO: 13101; SEQ ID NO: 13102; SEQ ID NO: 13103; SEQ |
| | | ID NO: 13104; SEQ ID NO: 13105; SEQ ID NO: 13106; SEQ ID |
| | | NO: 13119 |
| 8 | 95.11% | SEQ ID NO: 13101; SEQ ID NO: 13102; SEQ ID NO: 13103; SEQ |
| | | ID NO: 13104; SEQ ID NO: 13105; SEQ ID NO: 13106; SEQ ID |
| | | NO: 13119; SEQ ID NO: 13117 |
| 9 | 96.41% | SEQ ID NO: 13101; SEQ ID NO: 13102; SEQ ID NO: 13103; SEQ |
| | | ID NO: 13104; SEQ ID NO: 13105; SEQ ID NO: 13106; SEQ ID |
| | | NO: 13119; SEQ ID NO: 13117; SEQ ID NO: 13121 |
| 10 | 97.65% | SEQ ID NO: 13101; SEQ ID NO: 13102; SEQ ID NO: 13103; SEQ |
| | | ID NO: 13104; SEQ ID NO: 13105; SEQ ID NO: 13106; SEQ ID |
| | | NO: 13119; SEQ ID NO: 13117; SEQ ID NO: 13121; SEQ ID NO: |
| | | 13108 |
| 11 | 98.16% | SEQ ID NO: 13101; SEQ ID NO: 13102; SEQ ID NO: 13103; SEQ |
| | | ID NO: 13104; SEQ ID NO: 13105; SEQ ID NO: 13106; SEQ ID |
| | | NO: 13119; SEQ ID NO: 13117; SEQ ID NO: 13121; SEQ ID NO: |
| | | 13108; SEQ ID NO: 13109 |
| 12 | 98.57% | SEQ ID NO: 13101; SEQ ID NO: 13102; SEQ ID NO: 13103; SEQ |
| | | ID NO: 13104; SEQ ID NO: 13105; SEQ ID NO: 13106; SEQ ID |
| | | NO: 13119; SEQ ID NO: 13117; SEQ ID NO: 13121; SEQ ID NO: |
| | | 13108; SEQ ID NO: 13109; SEQ ID NO: 13115 |
| 13 | 98.95% | SEQ ID NO: 13101; SEQ ID NO: 13102; SEQ ID NO: 13103; SEQ |
| | | ID NO: 13104; SEQ ID NO: 13105; SEQ ID NO: 13106; SEQ ID |
| | | NO: 13119; SEQ ID NO: 13117; SEQ ID NO: 13121; SEQ ID NO: |
| | | 13108; SEQ ID NO: 13109; SEQ ID NO: 13115; SEQ ID NO: 13107 |
| 14 | 99.17% | SEQ ID NO: 13101; SEQ ID NO: 13102; SEQ ID NO: 13103; SEQ |
| | | ID NO: 13104; SEQ ID NO: 13105; SEQ ID NO: 13106; SEQ ID |
| | | NO: 13119; SEQ ID NO: 13117; SEQ ID NO: 13121; SEQ ID NO: |
| | | 13108; SEQ ID NO: 13109; SEQ ID NO: 13115; SEQ ID NO: |
| | | 13107; SEQ ID NO: 13116 |
| 15 | 99.37% | SEQ ID NO: 13101; SEQ ID NO: 13102; SEQ ID NO: 13103; SEQ |
| | | ID NO: 13104; SEQ ID NO: 13105; SEQ ID NO: 13106; SEQ ID |
| | | NO: 13119; SEQ ID NO: 13117; SEQ ID NO: 13121; SEQ ID NO: |
| | | 13108; SEQ ID NO: 13109; SEQ ID NO: 13115; SEQ ID NO: |
| | | 13107; SEQ ID NO: 13116; SEQ ID NO: 13113 |
| 16 | 99.52% | SEQ ID NO: 13101; SEQ ID NO: 13102; SEQ ID NO: 13103; SEQ |
| | | ID NO: 13104; SEQ ID NO: 13105; SEQ ID NO: 13106; SEQ ID |
| | | NO: 13119; SEQ ID NO: 13117; SEQ ID NO: 13121; SEQ ID NO: |
| | | 13108; SEQ ID NO: 13109; SEQ ID NO: 13115; SEQ ID NO: |
| | | 13107; SEQ ID NO: 13116; SEQ ID NO: 13113; SEQ ID NO: 13112 |
| 17 | 99.65% | SEQ ID NO: 13101; SEQ ID NO: 13102; SEQ ID NO: 13103; SEQ |
| | | ID NO: 13104; SEQ ID NO: 13105; SEQ ID NO: 13106; SEQ ID |
| | | NO: 13119; SEQ ID NO: 13117; SEQ ID NO: 13121; SEQ ID NO: |
| | | 13108; SEQ ID NO: 13109; SEQ ID NO: 13115; SEQ ID NO: |
| | | 13107; SEQ ID NO: 13116; SEQ ID NO: 13113; SEQ ID NO: |
| | | 13112; SEQ ID NO: 13122 |
| 18 | 99.75% | SEQ ID NO: 13101; SEQ ID NO: 13102; SEQ ID NO: 13103; SEQ |
| | | ID NO: 13104; SEQ ID NO: 13105; SEQ ID NO: 13106; SEQ ID |
| | | NO: 13119; SEQ ID NO: 13117; SEQ ID NO: 13121; SEQ ID NO: |
| | | 13108; SEQ ID NO: 13109; SEQ ID NO: 13115; SEQ ID NO: |
| | | 13107; SEQ ID NO: 13116; SEQ ID NO: 13113; SEQ ID NO: |
| | | 13112; SEQ ID NO: 13122; SEQ ID NO: 13118 |
| 19 | 99.84% | SEQ ID NO: 13101; SEQ ID NO: 13102; SEQ ID NO: 13103; SEQ |
| | | ID NO: 13104; SEQ ID NO: 13105; SEQ ID NO: 13106; SEQ ID |
| | | NO: 13119; SEQ ID NO: 13117; SEQ ID NO: 13121; SEQ ID NO: |
| | | 13108; SEQ ID NO: 13109; SEQ ID NO: 13115; SEQ ID NO: |
| | | 13107; SEQ ID NO: 13116; SEQ ID NO: 13113; SEQ ID NO: |
| | | 13112; SEQ ID NO: 13122; SEQ ID NO: 13118; SEQ ID NO: 13111 |
| 20 | 99.90% | SEQ ID NO: 13101; SEQ ID NO: 13102; SEQ ID NO: 13103; SEQ |
| | | ID NO: 13104; SEQ ID NO: 13105; SEQ ID NO: 13106; SEQ ID |
| | | NO: 13119; SEQ ID NO: 13117; SEQ ID NO: 13121; SEQ ID NO: |
| | | 13108; SEQ ID NO: 13109; SEQ ID NO: 13115; SEQ ID NO: |
| | | 13107; SEQ ID NO: 13116; SEQ ID NO: 13113; SEQ ID NO: |
| | | 13112; SEQ ID NO: 13122; SEQ ID NO: 13118; SEQ ID NO: |
| | | 13111; SEQ ID NO: 13114 |
| 21 | 99.97% | SEQ ID NO: 13101; SEQ ID NO: 13102; SEQ ID NO: 13103; SEQ |
| | | ID NO: 13104; SEQ ID NO: 13105; SEQ ID NO: 13106; SEQ ID |
| | | NO: 13119; SEQ ID NO: 13117; SEQ ID NO: 13121; SEQ ID NO: |
| | | 13108; SEQ ID NO: 13109; SEQ ID NO: 13115; SEQ ID NO: |
| | | 13107; SEQ ID NO: 13116; SEQ ID NO: 13113; SEQ ID NO: |
| | | 13112; SEQ ID NO: 13122; SEQ ID NO: 13118; SEQ ID NO: |
| | | 13111; SEQ ID NO: 13114; SEQ ID NO: 13120 |
| 22 | 100.00% | SEQ ID NO: 13101; SEQ ID NO: 13102; SEQ ID NO: 13103; SEQ |
| | | ID NO: 13104; SEQ ID NO: 13105; SEQ ID NO: 13106; SEQ ID |
| | | NO: 13119; SEQ ID NO: 13117; SEQ ID NO: 13121; SEQ ID NO: |
| | | 13108; SEQ ID NO: 13109; SEQ ID NO: 13115; SEQ ID NO: |
| | | 13107; SEQ ID NO: 13116; SEQ ID NO: 13113; SEQ ID NO: |
| | | 13112; SEQ ID NO: 13122; SEQ ID NO: 13118; SEQ ID NO: |
| | | 13111; SEQ ID NO: 13114; SEQ ID NO: 13120; SEQ ID NO: 13110 |

[0597] The minimal set of six crRNAs also included one crRNA (designated crRNA-N18f) that was validated (FIGS. 9A-9D). Analysis of 103 SARS-COV-2 genomes indicated that there are two major types (L and S) of SARS-COV-2 existing with different viral signature sequences. To verify whether crRNA-N18f may target all L and S strains, all recent sequenced SARS-COV-2 sequences were retrieved from Global Initiative on Sharing All Influenza Data (GISAID) for a set of 202 SARS-COV-2 genomes. Notably, crRNA_N18f targeted all 201 genomes with only one SARS-COV-2 sequence carried a single mismatch mutation. This may validate the approach described in the instant disclosure to target broad SARS-COV-2 strains and the need to use a pool of crRNAs to avoid mutational escapes.

### Example 7. Screening Guide RNAs to Target Human 229E Coronavirus Genome

[0598] FIG. 10 illustrates crRNAs (guide RNA) design targeting the human 229E coronavirus genome. The crRNAs were designed to be complexed with any one of the Cas endonucleases described herein. For example, the crRNAs were designed to be complexed with Cas13d. 4 guides (crRNAs) targeted the 5′UTR region, which was also the leader sequence of all viral RNAs. 20 guides, R1-R20, targeted the RdRP, and 20 guides, N1-N20, targeted N gene. These two genes are the most conserved region of coronaviruses. Meanwhile, 10 guides, crasN1-N10, targeted the negative strand of N gene, and 2 guides target 3′UTR. 56 CasRx guides in total were designed to target the 229E genomic and subgenomic RNAs. RdRP and N gene are the most conserved region of 229E virus so that most guides, 20 for RdRP and 20 for N gene, were designed. Since all the viral RNAs, including genomic and subgenomic RNAs, are expressed carrying the same 5′UTR and 3′UTR sequence, several guides were designed to target these sequences. Besides, some guides targeting the negative stranded RNAs were also designed. FIG. 11 illustrates guide screening assay for determining the guide (40 crRNAs: SEQ ID NO: 13607-SEQ ID NO: 13646) with the best efficiency against 229E. Most guides inhibited more than 60% of the virus replication, and the best one, N20, may reach to 95% for targeting 229E in MRC-5 cells. The ones which helped cell survive better than control were selected. The viral titer in the supernatant were determined by RT-qPCR. Most guides may inhibit the virus replication to >60%, while the best one N20 may reach to 95%. FIG. 12 illustrates repeat testing of crRNAs targeting 229E. Virus titer in both the supernatant and cellular samples were determined by RT-qPCR. For quantification of cellular viral RNA, both N gene and RdRP gene were selected as target. Beta actin was the inner control. The CasRx with NLS or NES tag were used in 1:1 mixture or alone when testing the N1 guide. FIG. 12A illustrates crRNAs from the screen assay for repeat testing. While crR8 (SEQ ID NO: 13614), crR19 (SEQ ID NO: 13625), crN1 (SEQ ID NO: 13627), and crN2 (SEQ ID NO: 13628) inhibited about 80% of virus replication, crN4 (SEQ ID NO: 13630), crN9 (SEQ ID NO: 13635), and crN20 (SEQ ID NO: 13646) may reach to more than 90%. NLS CasRx were compared with NES version using the crN1 guide. The NLS version (92.5% inhibition) worked better than the NLS and NES mixture (81%). The NES version worked the worst (10%). The result from cellular RNA was in consistence with the supernatant. PAC-MAN may decrease the viral RNA in cellular and the released virus in supernatant. FIG. 12B illustrates repeat testing with cellular.

[0599] FIG. 13 illustrates testing of CasRx with no tags or tagged with nuclear localization signal (NLS), nuclear export signal (NES), or endoplasmic reticulum (ER) signal. Since the NLS Cas13d worked better than NES, Cas13d without a tag or was fused with ER location signal. From the result, Cas13d-NLS still worked the best, with a 83% inhibition effect, while Cas13d with no tag had 56% inhibition effect, Cas13d-ER had no effect, and Cas13d-NES had only 16% inhibition effect.

[0600] To examine the increased efficacy o of NLS-version of PAC-MAN, MRC5 cells were treated with NLS- or NES-version of PAC-MAN followed by infection of 0.1 MOI 229E. The cells were then stained with 229E RNA FISH N-probe and imaged by confocal. FIG. 14 illustrates how NLS-version of the PAC-MAN worked better than NES-version of the PAC-MAN. MRC5 cells were treated with NLS- or NES-version of PAC-MAN followed by infection of 0.1 MOI 229E. Then cells were stained with 229E RNA FISH N-probe and imaged by confocal. FIG. 14A illustrates RNA FISH probe set-1: targeting N gene (detecting all viral RNA). Same contrast adjustment was used for “Normal contrast” or “High contrast” lane of each group; thus, the intensity was comparable between each group. The signal of 229E FISH in N20 group was significantly decreased compared with non-target guide (NT6) control group, supporting the high efficiency of PAC-MAN. FIG. 14B illustrates the cell without detectable CasRx in cytosol (pointed by white arrow) had intensive signals of 229E FISH, while the cell with CasRx in cytosol (pointed by grey arrow) did not have detectable signals of 229E FISH, indicating that the cytosolic CasRx may be important for the high efficiency of PAC-MAN. FIG. 14C. The signals of 229E FISH were much more intensive in NES-CasRx group compared with that in NLS-CasRx group, though the signals of CasRx in cytosol of the two groups did not have significant difference as shown by the cells pointed by the white or grey arrows. The high efficiency of the NLS-version PAC-MAN compared with the NES-version PAC-MAN was due to the low efficient transport of gRNA to the cytosol and the disability of gRNA in cytosol. Both NES and NLS were expressed in cytosol to similar amount. Both of Cas13d (CasRx) proteins were distributed relatively even in cytosol, and there was also no difference on their localization with viral RNA. For the NLS high contrast figure, it was observed that when there's more Cas13d (CasRx) protein in cytosol, there was less viral RNA. In some cells, there was no Cas13d (CasRx) in cytosol. Accordingly, the Cas13d (CasRx) guide may not be efficiently exported from nuclear to cytosol, so NES version Cas13d (CasRx) may not work well. On the other hand, the NLS-version may enter the nucleus and then leaked to cytosol to function well at high expression.

[0601] FIG. 15 illustrates another representative image of cells with/without cytosolic CasRx. High expression of Cas13d (CasRx) may leak some Cas13d to cytosol, these Cas13d-crRNA may repress virus replication. The merge picture showed that the cell with Cas13d cytoplasm expression delete the virus. Some cells may not delete virus, because of lack of Cas13d cytoplasm expression. FIG. 16 illustrates analysis of captured images of FIG. 14 and FIG. 15. FIG. 16A illustrates that for cells expressing NLS-CasRx and gRNA in N20 (SEQ ID NO: 13646) and NT6 groups, the number of cells with/without 229E FISH signal was counted. Then, the ratio of cells without 229E FISH signal was calculated. FIG. 16B illustrates that for cells with or without NLS-CasRx expressed in cytosol in N20 group, the number of cells with or without 229E FISH signal was counted. Then, the ratio of cells without 229E FISH signal was calculated. The expression level of CasRx in most cells with NLS-CasRx in cytosol was higher than that of cells without NLS-CasRx in cytosol.

[0602] To further examine the location of the CasRx, the MRC-5 cells in group “lentivirus-guide” were co-transduced with NES- or NLS-CasRx and guide. 6 hour post transfection (6 hpi), the cells were infected with 229E at an MOI of 0.01. FIG. 17 illustrates that when using lentivirus to deliver the guide, the guide was transcribed in nucleus, the NLS-version of CasRx worked better than NES.-version of CasRx. These results suggested that the guide expressed by lentivirus were mostly kept in nucleus. Only the NLS-CasRx may enter the nucleus and bind the guide and a part of the RNP may be exported into cytosol and cut the viral RNA of coronavirus. While delivering guide RNA directly into cytosol, the NES-CasRx worked much better. FIG. 17 also illustrates that the lentivirus transduced gRNA stayed in nucleus, thus NLS-Cas13d may enter into the nucleus to complex with the gRNA and leached out of nucleus. In contrast, NES-Cas13d may not enter the nucleus, thus may not form a complex with the gRNA in the nucleus to the same extent, thus not as effective in reducing coronavirus replication. When using lentivirus to deliver the guide (crRNA), the guide were transcribed in nucleus, the NLS CasRx worked better than NES, which was 64% v.s. 29% of inhibition on virus replication at 24 hpi and 82% vs 6% at 48 hpi (FIG. 17). The NLS-CasRx may enter the nucleus and bind the guide and some of the RNP may be exported into cytosol and cut the viral RNA of coronavirus (FIGS. 14-16).

### Example 8. Cell Viability Measurement

[0603] To measure cell viability of the cells described herein, cells were seeded and transduced with CasR and the crRNAs described herein on day 0. On Day 2, the transduced cells were infected with 229E at an MOI of 0.01. 250 nM Cytotox Green Reagent was added in the media for measurement of viability. The cells were imaged for about 4 days using live-cell imaging system. Compared to non-target guide (NT6), all the tested 229E guides helped the cells surviving 229E infection. On day 3, more than 70% cells in the NT6 group (53% of the 75% PAC-MAN positive cells) were dead, while more than 90% cells in the crN1 group (86% of the 95% PAC-MAN positive cells) were alive.

[0604] FIG. 18 illustrates how PAC-MAN helps cell surviving 229E infection. Compared to non-target guide (NT6), all the tested 229E guides, including crR8, crR19, crN1, crN4, crN8, crN9, and crN20, helped the cells survive 229E infection for at least 3 days. On day 3, while less than 30% cells in the NT6 group (22% of the 75% PAC-MAN positive cells) were alive, more than 90% cells in the crN1 group (86% of the 95% PAC-MAN positive cells) were alive.

[0605] FIG. 19 illustrates repeat testing PAC-MAN with mock control. The total integrated intensity of the green dye (GCU×μm2/Image), which quantifies cell death, was plotted in both one curve (FIG. 19A) and microplate curve (FIG. 19B). FIG. 19A illustrates 229E targeting guide N20 protected the cells from death during a 5 day infection, while most cells transduced with a non-targeting guide (NT6) or mock control were dead. FIG. 19B illustrates integrated intensity of the cells transuded with NT6, N20, or mock control.

[0606] FIG. 20 illustrates testing with PAC-MAN with 229E fused with GFP (229E-GFP). The 229E-GFP virus was used to validate the effect of PAC-MAN. The virus may infect and replicate in the cells transduced with non-targeting guide with many GFP positive cells showed up, while not in the cells transduced with 229E targeting guides. The 229E targeting guide N20 protected the cells from death during a 5 day infection, while most cells transduced with a non-targeting guide NT6 were dead. The 229E-GFP virus was used to validate the effect of PAC-MAN. The virus infected and replicated in the cells transduced with non-targeting guide while not in the cells transduced with 229E targeting guides.

### Example 9. Different MOI and Virus Dosage Test

[0607] To test the PAC-MAN, cells were infected by 229E at different MOIs. FIG. 21 illustrates testing of PAC-MAN against 229E infection at different multiplicity of infections (MOIs). The 229E targeting guide N20 protected the cells from death, while most cells transduced with a non-targeting guide NT6 were dead. FIG. 21A illustrates that the PAC-MAN inhibited virus replication and protected cells from death even when infected at an MOI as high as 1.0, 100-fold higher than the frequently used 0.01 in the in vitro assays. FIG. 21B illustrates a lentiviral dose test. The inhibition effect of PAC-MAN on 229E virus showed a dose-dependent effect. The higher dose of the PAC-MAN components were used, the higher inhibition effect. The transduction of 100K cells with 6.7 ul of CasRx-NLS and 6.7 ul of guide lentivirus as 1×dose was defined. When using 8×dose, the inhibition was more than 90%. FIG. 22 illustrates PAC-MAN dose effect. The higher dose of PAC-MAN components were transduced, the higher number of cells survived the 229E infection and the longer the cells kept alive.

### Example 10. Synergistic Effect Testing for PAN-MAN and IFNα and Camostat

[0608] FIG. 23 illustrates synergistic effect of treating the infected cells with PAC-MAN and IFN alpha (IFNα) 4b and Camostat mesylate. FIG. 23A illustrates the cytotoxicity of the IFNα 4b and Camostat mesylate and their effect on inhibition of 229E virus. These two drug showed no obvious cytotoxicity at the tested concentrations. The EC50 of IFNα 4b was 1 U/ml. The EC50 of Camostat mesylate was about 500 μM. When combining these two drugs with PAC-MAN, an enhance effect was observed as the combination further decreased virus replication. FIG. 23B illustrates the synergistic effect at 24 hour post-infection (hpi). From this synergistic effect test, with no drug, the PAC-MAN with guide N1 inhibited 93% of the virus replication, N20 was 84%, and R19 was 50%. The combination of the PAC-MAN with IFNα 4b showed an enhanced effect on inhibition of the virus replication, except that N1 showed a minus effect, the inhibition effect decreased from 93% to 90%. It showed a very synergistic effect when the PAC-MAN was combined with Camostat mesylate. When combined with this inhibitor, PAC-MAN using guide N1 further inhibited the virus replication to 97% lower than the control (NT6 with no drug). While the PAC-MAN (N1) alone was 14.2 fold and the drug alone was 2.4 fold, the combination decreased the virus titer to 39 fold lower than the control. The guide N20 and R19 both showed a promising synergistic effect with the Camostat mesylate. Compared to the NT6 in “no drug” or “IFN” or “Camostat” group, the percentage of inhibition on virus titer was labelled above each bar, the fold change was also labelled. The inhibition effect between drug treated with no drug were labelled with lines above the bars.

[0609] The EC50 of Camostat mesylate was about 500 μM. When combining these two drugs with PAC-MAN, the additive effect from IFNα 4b and Camostat mesylate were observed (FIG. 23C). These combinations further decreased virus replication. The PAC-MAN using guide N20 decreased virus titer 6.2 fold (6.2×) lower than NT. IFNα 4b decreased virus titer by 4.4×. Their combination showed an additive effect, which was 10.1×(FIG. 23C top middle). While N1 and R19 showed a minus effect with IFNα 4b (FIG. 23C top left and right). It showed a synergistic effect when the PAC-MAN was combined with Camostat mesylate (FIG. 23C, bottom). While the PAC-MAN using guide N1 alone showed a 14.2 fold decrease of virus titer and the drug alone showed a 2.4 fold decrease, the combination decreased the virus titer to 39 fold lower than the control (FIG. 23C bottom left). The guide N20 and R19 both showed synergistic effect with the Camostat mesylate, too (FIG. 23C bottom middle and right).

### Example 11. Off-Target of PAC-MAN

[0610] FIG. 24 illustrates RNAseq for determining the off-target effect of PAC-MAN targeting 229E. To analyze off-target effect of Cas13d, Cas13d, Cas13d plus 229E targeting crRNAs (FIG. 24), Cas13d plus SARS-CoV-2 targeting crRNAs (FIG. 27A) were transfected into A549 cells. After 72 hours, the cells were harvested for RNAseq to check the gene expression profile. Cells transfected with Cas13d, or Cas13d plus crRNAs had very similar gene expression pattern. These results suggested that there was no observable Cas13d off-target activities. The top graphs are replicates of every sample. The graphs show that the replicates are consistent. The bottom graphs show Cas13d+crRNA compared to Cas13d only sample, which doesn't show any off-target effect.

### Example 12. crRNA Screening of SARS-CoV-2

[0611] Cas13d expression-veroE6 stable cell line was used to test the protective effect of the crRNAs described herein. FIG. 25 illustrates screening of crRNAs targeting SARS-CoV-2. Using Cas13d expression-veroE6 cell line, crRNAs against SARS-CoV-2 were subjected to repeat testing. FIG. 25A illustrates supernatant test showing that many crRNAs may decrease viral RNA load. Supernatant test showed that crRNAs targeting SARS-CoV-2 decreased viral RNA load. The best crRNA was N20 with the repression efficiency of 96%. Combination of N20 and N10 may get 97% of repression efficiency. FIG. 25A also illustrates additional crRNAs (e.g., other than SEQ ID NOs: 13607-13646). For example, FIG. 25A also illustrates crRNA48-50 (SEQ ID NOs: 13647-13649) for screening purpose. FIG. 25B illustrates supernatant test at 24 hpi. Cellular viral RNA test showed similar results with supernatant results. FIG. 25C illustrates cell sample test at 24 hpi. FIG. 25D illustrates supernatant test at 48 hpi. FIG. 25D illustrates cell sample test at 48 hpi with Cas13d expression-veroE6 cell line. Supernatant test showed that crRNAs targeting SARS-CoV-2 may dramatically decrease viral RNA load. FIG. 26 illustrates screening of crRNAs targeting SARS-CoV-2 at 72 hpi. FIG. 26A illustrates supernatant test showing that crRNAs targeting SARS-CoV-2 may dramatically decrease viral RNA load. FIG. 26B and FIG. 26C illustrate summary of repeat testing of protecting cells from SARS-CoV-2 infection at 72 hpi. Under the same crRNA concentration, it was found that two crRNAs may protect cells from SARS-CoV-2 infection for a longer time. The repression efficiency of single crRNA gradually decreased. However, the combination of two crRNAs, they maintained the same repression efficiency. This indicated that multiple crRNAs were better than single crRNA for cell protection under the same concentration.

[0612] FIG. 27A illustrates SARS-CoV-2 off-target effect of PAC-MAN. RNAseq was performed to check the off-target effect of PACMAN (targeting SARS-CoV-2). The top graphs were two replicates of every sample. The bottom graphs showed Cas13d+crRNA compare to Cas13d only sample, which didn't show any off-target effect. FIG. 27B illustrates how the PAC-MAN with designed crRNAs efficiently knocked down endogenous genes: alanine aminopeptidase (APN, SEQ ID NOs: 13601-13064), transmembrane protease, serine 2 (TMPRSS2, SEQ ID NO: 13605), methylenetetrahydrofolate dehydrogenase 1 (MTHFD1, SEQ ID NO: 13606) and also helped blocking virus replication or propagation.

### Example 13. Design Prophylactic Antiviral CRISPR in huMAN Cells (PAC-MAN) as a Form of Genetic Vaccine to Target Influenza a Viruses

[0613] To inhibit RNA viruses in human cells, the CRISPR-Cas13d system derived from Ruminococcus flavefaciens XPD3002, a recently discovered RNA-guided RNA endonuclease, can be used. Cas13d uses CRISPR-associated RNAs (crRNAs) that contain designable 22 nucleotide (nt) spacer regions that can direct the Cas13d protein to specific RNA molecules for targeted RNA degradation. This provides a potential mechanism for targeting virus for specific viral RNA genome degradation and viral gene expression inhibition. Because of its small size (2.8 kb), high specificity, and strong catalytic activity, the Cas13d can target and destroy RNA viruses including all strains of the influenza viruses.

[0614] Described herein is a CRISPR strategy named Prophylactic Antiviral CRISPR in huMAN cells (PAC-MAN) developed as a form of genetic vaccine to target circulating influenza stain and potentially all sequenced of influenza viruses. A bioinformatic pipeline defined highly conserved regions across the influenza virus genomes and flagged these regions for genome degradation and viral gene inhibition by the use of CRISPR-dCas13d. A panel of designed crRNA pools was screened against influenza fragments for how well the crRNAs may target conserved viral regions in order to identify the most effective crRNAs. Such pools of crRNAs can then be part of a pan-influenza treatment regiments.

### Example 14. Cas13d PAC-MAN is Able to Inhibit IAV Infection in Human Lung Epithelial Cells

[0615] To create crRNAs targeting a broad range of IAV strains, all complete IAV genomes retrieved from the Influenza Research Database were aligned and searched for the most conserved regions. All complete, pre-aligned, complementary RNA (cRNA) segment sequences for IAV were downloaded from the Influenza Research database. All sequences were reverse-transcribed to viral RNA (vRNA) and filtered for the most-frequently occurring length for each segment. Each filtered segment was uploaded to Weblogo3 (http://weblogo.threeplusone.com/) to create weblogos for visualization. These segment ends are highly conserved for all 8 segments. The segment ends are attractive regions for targeting with Cas13d, because of the potential to inhibit a broad range of IAV strains and because of the previous evidence that interfering with the packaging of one segment encoded on the segment ends can decrease the packaging efficiency of other segments and overall virion packaging. Using sequence representation from ˜140 different strains of influenza, crRNAs were designed to robustly bind to as many different IAV strains as possible. The bioinformatics analysis resulted in 6 crRNAs targeting highly conserved genome regions for each of the 8 IAV segments, for a total of 48 crRNAs (SEQ ID NOs: 13301-13354, 13401-13448, or 13501-13548).

[0616] To test the efficiency of IAV-targeting crRNAs, a screen was performed with the crRNA pools in the stable Cas13d A549 cell line to determine which were most effective at inhibiting IAV infection (FIG. 28A). To do this, A549 cells were transfected with a pool of 6 crRNAs targeting a given IAV genome segment. Two days after crRNA transfection, the Cas13d A549 cells were challenged with PR8-mNeon, a strain of H1N1 IAV engineered to express the mNeonGreen gene, a fluorescent reporter protein (hereafter referred to as PR8-mNeon) at an MOI of 2.5 or 5.0. At 18 hours post-challenge, the cells were analyzed for IAV infection through microscopy and flow cytometry by examining the percentage of mNeon positive cells for each segment-targeting crRNA pool and the non-targeting crRNA pool.

[0617] Out of all crRNAs, the crRNA pool targeting segment 6 (S6) delivered the most consistent and robust results across different MOIs (72% reduction for MOI=2.5 and 52% reduction for MOI=5: FIG. 28B and FIG. 29A). Additionally, the segment 4 (S4) pool also showed moderate but consistent inhibition. To verify Cas13d-mediated inhibitory effects on S4 and S6, a lower MOI of 0.5 was further tested, which showed better inhibition of IAV across samples (e.g., 79% reduction using crRNAs targeting S6; FIG. 29B). This confirmed consistent inhibitory activity of IAV by Cas13d when targeting these two segments. There is a possible trend of greater inhibition at lower viral titers, suggesting that Cas13d PAC-MAN may be a particularly effective strategy for prevention of new infections, which typically occurs from exposure to a low level of virus.

[0618] The S6-targeting crRNA pool was further characterized. S6 encodes the gene neuraminidase (NA), which releases budding virions from the host cell. Microscopy quantification was performed on mNeon+ cells and found that mNeon expression was reduced by 62% (p=10⁻⁵) and 73% (p=5×10⁻⁹) with an MOI of 2.5 and 5, respectively, with S6-targeting crRNAs (FIG. 29C), and this trend was corroborated by flow cytometry (FIG. 29D). Together, the data showed that Cas13d PAC-MAN was able to target highly conserved viral regions and robustly inhibit viral replication in human lung epithelial cells.

### Example 15. An Integrated Pipeline for Cas13 crRNA Analysis for Virus-Targeting Coverage, Efficiency, and Specificity

[0619] The COVID-19 pandemic caused by SARS-CoV-2 has led to significant mortality, highlighting the need for antivirals to combat RNA viruses. The RNA-guided RNA-targeting CRISPR-Cas13 system offers an antiviral strategy against SARS-CoV-2 sequences and live influenza A virus. In silico analysis of using PAC-MAN can be expanded to target notable pathogenic viral species and most human-infectious RNA viruses. An integrated pipeline described herein has been created to analyze crRNAs that can target broad virus strains with high predicted efficiency using a reported algorithm and transcriptome-wide specificity. Among 16 RNA virus families, analysis revealed that a group of 14 crRNAs (SEQ ID NOs: 13651-13664) were able to target 10 distinct families (24.407 strains; targeting SEQ ID NOs: 13671-13684) by targeting at least 90% of human-infectious viruses, as well as determinant numbers of crRNAs needed to cover a virus family. An online resource, COMBAT (COMputer-aided Broad-spectrum AnTiviral) was constructed, to disseminate the Cas13d crRNAs targeting RNA viruses. Validation of the crRNAs targeting SARS-CoV-2 sequences showed a high correlation between predicted and measured efficiency. This work provided useful analysis and a resource for using PAC-MAN to target broad pathogenic RNA viruses and facilitates CRISPR-based antiviral tool development.

[0620] Since December 2019, the world has been devastated by the COVID-19 pandemic, caused by the RNA virus, Severe Acute Respiratory Syndrome coronavirus 2 (SARS-CoV-2). Besides SARS-CoV-2, the outbreaks of many RNA viruses in recent years, including Zika virus, Ebola virus, Marburg virus, and MERS (Middle East Respiratory Syndrome) virus, have led the World Health Organization (WHO) to declare public health emergencies. While vaccines and therapeutic options against SARS-CoV-2 have advanced into clinical trials, most RNA viruses lack an approved therapy.

[0621] In search of potential antivirals, a CRISPR-Cas13d-based strategy, PAC-MAN (Prophylactic Antiviral CRISPR in huMAN cells) was developed to target and inhibit SARS-CoV-2 and IAV sequences. A few works also reported that CRISPR-Cas13a/b systems can be used to inhibit RNA viruses, including lymphocytic choriomeningitis virus (LCMV), vesicular stomatitis virus (VSV), human immunodeficiency virus type 1 (HIV-1), human respiratory syncytial virus (HRSV), Dengue virus, Turnip mosaic virus and tobacco turnip mosaic RNA virus (TuMV). The CRISPR-Cas13 systems (subtypes a, b, d) offer attractive prophylactic or therapeutic options due to several key features) CRISPR-Cas13 is highly programmable, which allows it to be rapidly adapted against new RNA viruses by designing the crRNA sequence) crRNAs can be designed to target highly conserved viral sequences to cover multiple strains and prevent viral mutational escape. One remaining question is whether the system can be expanded to target a broad-spectrum of RNA viruses.

[0622] Here, an in silico comprehensive analysis of using PAC-MAN was developed to target notable pathogenic viral species and all human-infectious RNA viruses in the Virus Pathogen Database and Analysis Resource (ViPR). An integrated crRNA analysis pipeline was first generated by incorporating multiple existing algorithms that compute the coverage, efficiency and specificity of crRNAs for targeting RNA viruses. Using this pipeline, crRNAs for targeting 16 RNA virus families were searched. 10 non-segmented RNA virus families were observed to be targeted by a small group of 14 crRNAs (SEQ ID NOs: 13651-13664) with more than 90% coverage of human-infectious viruses. A few families of viruses may be even targeted by 1 or 2 crRNAs for coverage of more than 90% of sequenced strains. In contrast, families of viruses with segmented RNA genomes required significantly more crRNAs for full targeting. An online resource, COMBAT (COMputer-aided Broad-spectrum AnTiviral), was built to disseminate Cas13d crRNAs targeting a broad spectrum of RNA viruses. A group of predicted crRNAs targeting the SARS-CoV-2 sequences was also experimentally tested and found a high correlation between predicted and validated efficiency. All computed crRNAs are publicly available at http://crispr-combat.stanford.edu/. This work provides a comprehensive analysis and useful resource for using PAC-MAN to target broad pathogenic RNA viruses and can facilitate CRISPR-based antiviral technology development.

[0623] RNA virus genomes were retrieved from public databases, including 16 RNA virus families from the Virus Pathogen Database and Analysis Resource (ViPR), human immunodeficiency virus (HIV) from NCBI, and influenza A or B viruses (IAV or IBV) from the Influenza Research Database (IRD) (Table 7). This pipeline first analyzed conserved genome sequences (e.g., SEQ ID NO: 13740) within a designated group of viruses, which generated the primary regions for crRNA targeting (FIG. 30A). All possible crRNA candidates were generated with perfect matches to the conserved sequence. The pipeline eliminated crRNAs putative with off-target binding in the human transcriptome (<=2 mismatches), a threshold that was previously defined to distinguish specific vs. non-specific crRNAs. An algorithm that predicted crRNA efficiency score (range 0˜1, cut off >=0.5) was used and computed the coverage of virus strain targeting for every crRNA. The pipeline was used to analyze two types of crRNAs with different features. The first type is species-specific crRNAs, which were a comprehensive set of crRNAs that targeted conserved regions in closely related branches of viruses with predicted specificity and efficiency. The second type was family-covering crRNAs, which were minimal pools of crRNAs that collectively target all viruses in a family.

TABLE 7
Analyzed RNA virus families and species relating to FIG. 30

| Virus | | RNA | | All analyzed strains | Human-Host |
|---|---|---|---|---|---|
| Family/Featured | Data- | Virus | Segmented | (or segmented | analyzed |
| Virus Name | bases | Types | Genome? | genomes) | strains |
| arenaviridae | ViPR | −ssRNA | Yes | 1850 | 1127 |
| caliciviridae | ViPR | +ssRNA | NO | 2010 | 1284 |
| coronaviridae | ViPR | +ssRNA | NO | 3382 | 724 |
| filoviridae | ViPR | −ssRNA | NO | 871 | 492 |
| flaviviridae | ViPR | +ssRNA | NO | 14697 | 7881 |
| hantaviridae | ViPR | −ssRNA | Yes | 2865 | 270 |
| hepeviridae | ViPR | +ssRNA | NO | 643 | 305 |
| nairoviridae | ViPR | −ssRNA | Yes | 884 | 404 |
| paramyxoviridae | ViPR | −ssRNA | NO | 2614 | 911 |
| peribunyaviridae | ViPR | −ssRNA | Yes | 3489 | 449 |
| phenuiviridae | ViPR | −ssRNA | Yes | 3182 | 1832 |
| picomaviridae | ViPR | +ssRNA | NO | 5909 | 3172 |
| pneumoviridae | ViPR | −ssRNA | NO | 1840 | 1733 |
| reoviridae | ViPR | dsRNA | Yes | 44700 | 6605 |
| rhabdoviridae | ViPR | −ssRNA | NO | 2785 | 40 |
| togaviridae | ViPR | +ssRNA | NO | 1984 | 735 |
| HIV | NCBI | +ssRNA | NO | 540 | |
| Influenza_A_virus | IRD | −ssRNA | Yes | 71291 | |
| Influenza_B_virus | IRD | −ssRNA | Yes | 9193 | |

### Example 16. Targeting Pandemic/Epidemic-Causing Pathogenic RNA Virus Species Using PAC-MAN

[0624] crRNAs for each pandemic/epidemic-causing pathogenic RNA virus species per World Health Organization (WHO) were first identified, including SARS, SARS-CoV-2, MERS, Ebola virus, Marburg virus, Zika virus, Chikungunya virus, and Nipah virus. For most pathogenic virus species, a collection of crRNAs with predicted high specificity (>=3 mismatches) and efficiency (score>=0.5) was obtained, with each crRNA covering more than 90% of sequenced strains (FIG. 30B). One exception was Nipah virus, for which no crRNA candidate was able to cover 90% of sequenced strains. Nevertheless, lowering the requirement to 80% virus strain coverage showed a list of crRNAs that may target the Nipah virus.

### Example 17. Analysis of PAC-MAN for Targeting a Broad Spectrum of RNA Viruses

[0625] crRNA that may be used to target a broad spectrum of RNA virus families was next analyzed. 10 RNA virus families (calicividirae, coronaviridae, filoviridae, hepeviridae, paramyxoviridae, phenuiviridae, picomaviridae, pneumoviridae, rhabdoviridae, and togaviridae) from the ViPR database that infect various human organs and systems, including 6 positive-sense single-strand RNA (ssRNA) virus families, 4 negative-sense ssRNA virus families, and HIV and IAV species (FIG. 30C) were analyzed. For each family or HIV/IAV species, the smallest minipool of crRNAs that may collectively target every strain using a greedy approximation algorithm was determined.

[0626] 10 RNA virus families and HIV may be targeted by a small set of crRNAs (3-23 crRNAs). One exception is IAV, which required 78 crRNAs for full coverage likely due to its high diversity and its segmented genome, which was split into 8 segments (FIG. 30D). Since many families contained rare strains with distinct genomes, if aiming to target at least 90% of viral strains, all families may be targeted by a very small number of crRNAs (1-6) (FIG. 30E).

[0627] Importantly, a minipool of 14 crRNAs (SEQ ID NOs: 13651-13664) was able to target more than 90% of human-infectious viruses in the 10 RNA virus families (FIG. 30F and FIG. 34A). A total of 90 crRNAs may cover all strains (24,407) in the 10 families with zero mismatches. It was observed that this minipool also covered many common human-infectious viral species (FIG. 30G). This indicated that Cas13-mediated PAC-MAN may offer a potential broad-spectrum antiviral (BSA) strategy for broadly targeting human RNA viruses.

[0628] crRNAs that may target animal viruses were also analyzed. For this purpose, viruses were categorized according to their host, including common domestic livestock (cattle, sheep, pig, cat, and dog) that have close interaction with humans. For each category of virus, it was observed that a small set of crRNAs was able to target the majority of viruses (FIG. 30H and FIG. 34B). This analysis suggested that beyond human-infectious viruses, PAC-MAN may be used as a broad-spectrum antiviral strategy in animals, a field that was underdeveloped in biotechnology sector.

### Example 18. Determinants Required of crRNAs Targeting a Broad Spectrum of RNA Virus Families

[0629] Whether families with more virus strains required more crRNAs were analyzed. For the 10 RNA virus families analyzed, it was observed that a linear relationship between strain number and the required crRNA number (R=0.70, p=0.023, FIG. 31A). When all human and animal viruses were included, a similar linear relationship (R=0.75. p=0.012, FIG. 31B) was observed. This suggested that the required crRNA numbers to cover an RNA virus family was strongly influenced by the species/strain number in that family.

[0630] The observation that IAV required more crRNAs for coverage compared to the other 10 families and HIV led to analysis of more RNA virus families with segmented genomes. To do this, 6 segmented RNA virus families were included, including 5 negative-sense ssRNA virus families and 1 double-stranded RNA (dsRNA) virus family. All analyzed segmented RNA virus families were observed to require significantly more crRNAs for targeting human-infectious species in that family (16˜55 crRNAs for full coverage and 5˜23 crRNAs for 90% coverage, FIG. 31C and FIG. 31D). This was due to the reassortment process, a shared feature of segmented RNA viruses that had the capacity to exchange genome segments during co-infection. Reassortment greatly increased the diversity of segmented viral genome sequences, making it more challenging to define very few crRNAs to broadly cover strains. Despite the nature of these segmented genomes, it was observed that the number of required crRNAs for coverage was strongly correlated with the number of strain in that family (R=0.654, p=0.158, FIG. 31E) Overall, this data suggests that PAC-MAN was most effective against non-segmented RNA virus families for broad-spectrum targeting.

### Example 19. COMBAT is an Online Resource to Use CRISPR-Cas13d for Broad-Spectrum Antiviral Targeting

[0631] COMBAT (COMputer-aided Broad-spectrum AnTiviral), was built to facilitate the dissemination of analyzed Cas13d crRNAs for 16 RNA virus families, as well as for HIV, IAV and IBV. For species-specific crRNAs in each family, a library of crRNAs was defined with predicted high specificity (>=3 mismatches in the human transcriptome) and high efficiency (score >=0.5). An interactive tool was provided to facilitate the choice of crRNAs targeting specific genes on a virus. A graphical user interface (GUI) was also implemented for SARS-CoV-2, which integrated with the UCSC Genome Browser and created a visualization for the mapping of crRNAs to sequence position along the annotated viral genome for visualizing mapping of crRNAs to the annotated viral genome. An example is provided to show where predicted crRNAs target the SARS-CoV-2 genome (FIG. 32A, FIG. 32B, and FIG. 32C). For family-covering crRNAs, a phylogenetic tree was generated using the Interactive Tree Of Life (iTOL) tool to visualize the evolutionary relationship of the strains targeted by each crRNA. Each viral strain in the phylogenetic tree was annotated with the genus that the strain belonged to, whether the strain was a human host, and which (if any) of the first 5 crRNAs in the family-covering minipool targeted the strain. An example of this phylogenetic tree was provided to show family-covering crRNAs for the Filoviridae family including Ebola virus (FIG. 32D).

### Example 20. Validation of Predicted crRNAs for Targeting SARS-CoV-2 Sequences

[0632] Whether the predicted species-specific crRNAs may enable effective Cas13d-mediated inhibition of the SARS-CoV-2 sequence was experimentally validated. SARS-CoV-2 reporters, F1 and F2, which encoded a GFP gene fused to SARS-CoV-2 sequences encoding RNA-dependent RNA polymerase (RdRP) was used, which maintained virus proliferation, or nucleocapside (N), which controlled viral packaging (FIG. 35A). The Cas13d and crRNA were expressed using two plasmids as reported before (FIG. 35B). To measure the inhibitory effects of crRNAs, individual crRNA plasmids and SARS-CoV-2 reporter plasmids were co-transfected into A549 lung epithelial cells that expressed Cas13d, and quantified GFP expression using flow cytometry and target RNA abundance using quantitative PCR (qPCR) 48 hours post transfection (FIG. 35C).

[0633] A list of crRNAs targeting RdRP or N without efficiency prediction was first (FIG. 32B, FIG. 32C, and Table 8). Varying repression effects on the SARS-CoV-2 reporters of individual crRNAs were observed using flow cytometry (FIG. 33A and Table 9). Interestingly, there was a statistically significant high correlation between percentage of GFP repression and the predicted efficiency scores using a recently reported algorithm (R=0.834, p=1.667×10⁻⁵: FIG. 33B). These results were consistent with the repressive effects on RNA abundance as measured by qPCR (R=0.812, p=4.302×10-5; FIG. 33C, FIG. 33D, and Table 10). These data together suggested the reported algorithm was able to faithfully predict efficient crRNAs for viral genome targeting, despite it being developed based on data from crRNAs targeting human transcripts.

[0634] To further validate the performance of COMBAT-predicted crRNAs, more predicted crRNAs targeting the SARS-CoV-2 sequence with varying efficiency scores were tested (FIG. 32B and FIG. 32C). Again, a strong correlation between the predicted efficiency and the measured reporter repression (R=0.875, p=0.0009; FIG. 33E and FIG. 33F) was observed. The combined two sets of crRNAs showed a correlation of 0.856 (p=6.55×10⁻⁹, FIG. 33G). A binary trend was observed: most crRNAs with an efficiency score higher than 0.5 showed efficient repression, whereas crRNAs with an efficiency score lower than 0.5 showed almost no repression. This justified the choice of 0.5 as the threshold to determine the efficient crRNAs. These independent experiments confirmed the efficacy of COMBAT using the reported efficiency-prediction algorithm, which also suggested COMBAT may be used to predict crRNAs that efficiently inhibited other RNA virus sequences.

TABLE 8
All sequences used in the study, including crRNAS tested for targeting SARS-
CoV-2 and non-targeting crRNAs, related to FIG. 32

| | | Position on | | Predicted | |
|---|---|---|---|---|---|
| | | SARS-CoV-2 | Target | Efficiency | SEQ ID |
| Name | Spacer DNA sequence | genome | gene | Score | NO: |
| R1 | tctgatcccaatatttaaaata | 14296-14317 | RdRP | 0.08 | 13701 |
| R2 | ggcgtacacgttcacctaagtt | 13969-13990 | RdRP | 0.33 | 13702 |
| R3 | cttgagcacactcattagctaa | 15403-15424 | RdRP | 0.19 | 13703 |
| R4 | tagcagggtcagcagcatacac | 14557-14578 | RdRP | 0.52 | 13704 |
| R5 | aaacattaaagtttgcacaatg | 14365-14368 | RdRP | 0.69 | 13705 |
| R6 | gacaacaattagtttttaggaa | 13582-13603 | RdRP | 0.00 | 13706 |
| R7 | atatatgtggtaccatgtcacc | 13762-13783 | RdRP | 0.78 | 13707 |
| R8 | attaccttcatcaaaatgcctt | 13833-13854 | RdRP | 0.32 | 13708 |
| R9 | cttgattatctaatgtcagtac | 14050-14071 | RdRP | 0.48 | 13709 |
| R10 | aagaatctacaacaggaactcc | 14128-14149 | RdRP | 0.76 | 13710 |
| R11 | atcataagtgtaccatctgtttt | 15985-16007 | RdRP | 0.15 | 13711 |
| R12 | agcaaaattcatgaggtccttt | 15859-15880 | RdRP | 0.67 | 13712 |
| R13 | aacattttgcttcagacataaa | 15817-15838 | RdRP | 0.16 | 13713 |
| R14 | cactattagcataagcagttgt | 15496-15517 | RdRP | 0.64 | 13714 |
| N1 | ttgaatctgagggtccaccaaa | 28322-28343 | N | 0.60 | 13715 |
| N2 | ccccactgcgttctccattctg | 28355-28376 | N | 0.47 | 13716 |
| N3 | tgaaccaagacgcagtattatt | 28412-28433 | N | 0.11 | 13717 |
| N4 | aacgccttgtcctcgagggaat | 28468-28489 | N | 0.42 | 13718 |
| R15 | tactacagatagagacaccagc | 15111-15133 | RdRP | 1.00 | 13719 |
| R16 | acatttaggataatcccaaccc | 15284-15306 | RdRP | 0.96 | 13720 |
| R17 | tattaaatggaaaaccagctga | 14940-14962 | RdRP | 0.87 | 13721 |
| R18 | acagtagctcctctagtggcgg | 15178-15200 | RdRP | 0.50 | 13722 |
| R19 | caccatcgtaacaatcaaagta | 14874-14896 | RdRP | 0.20 | 13723 |
| R20 | aacatatagtgaaccgccacac | 15443-15465 | RdRP | 1.00 | 13724 |
| R21 | ggtcagtctcagtccaacattt | 15831-15853 | RdRP | 0.20 | 13725 |
| N5 | aaattgtgcaatttgcggccaa | 29172-29194 | N | 0.98 | 13726 |
| N6 | gcagcagatttcttagtgacag | 29006-29028 | N | 0.80 | 13727 |
| N7 | tgtgacttccatgccaatgcgc | 29226-29248 | N | 0.72 | 13728 |
| crRNA-NC | gaactcgtatccgatgataaga | | | | 13729 |

TABLE 9
P values for crRNA screens, relating to FIG. 33

| | | |
|---|---|---|
| crRNAs | Experiment | P value |

FIG. 33A

| | | |
|---|---|---|
| R1 | SARS-CoV-2 reporter expression | 1.50E−04 |
| R2 | SARS-CoV-2 reporter expression | 5.48E−04 |
| R3 | SARS-CoV-2 reporter expression | 1.40E−04 |
| R4 | SARS-CoV-2 reporter expression | 1.09E−05 |
| R5 | SARS-CoV-2 reporter expression | 2.88E−06 |
| R6 | SARS-CoV-2 reporter expression | 1.36E−03 |
| R7 | SARS-CoV-2 reporter expression | 1.17E−06 |
| R8 | SARS-CoV-2 reporter expression | 5.27E−05 |
| R9 | SARS-CoV-2 reporter expression | 1.12E−05 |
| R10 | SARS-CoV-2 reporter expression | 9.06E−07 |
| R11 | SARS-CoV-2 reporter expression | 4.13E−07 |
| R12 | SARS-CoV-2 reporter expression | 5.50E−07 |
| R13 | SARS-CoV-2 reporter expression | 7.43E−06 |
| N1 | SARS-CoV-2 reporter expression | 6.06E−08 |
| N2 | SARS-CoV-2 reporter expression | 1.58E−08 |
| N3 | SARS-CoV-2 reporter expression | 3.81E−05 |
| N4 | SARS-CoV-2 reporter expression | 2.45E−03 |
| N5 | SARS-CoV-2 reporter expression | 6.37E−05 |

FIG. 33C

| | | |
|---|---|---|
| R1 | mRNA abundance | 1.88E−05 |
| R2 | mRNA abundance | 9.13E−05 |
| R3 | mRNA abundance | 1.62E−06 |
| R4 | mRNA abundance | 4.57E−07 |
| R5 | mRNA abundance | 2.19E−09 |
| R6 | mRNA abundance | 2.35E−06 |
| R7 | mRNA abundance | 2.98E−10 |
| R8 | mRNA abundance | 1.58E−07 |
| R9 | mRNA abundance | 1.43E−09 |
| R10 | mRNA abundance | 2.34E−10 |
| R11 | mRNA abundance | 4.80E−09 |
| R12 | mRNA abundance | 1.81E−09 |
| R13 | mRNA abundance | 4.71E−08 |
| N1 | mRNA abundance | 3.26E−12 |
| N2 | mRNA abundance | 7.41E−12 |
| N3 | mRNA abundance | 1.37E−08 |
| N4 | mRNA abundance | 9.81E−07 |
| N5 | mRNA abundance | 3.54E−10 |

FIG. 33E

| | | |
|---|---|---|
| R15 | SARS-CoV-2 reporter expression | 1.15E−06 |
| N5 | SARS-CoV-2 reporter expression | 7.80E−07 |
| R16 | SARS-CoV-2 reporter expression | 1.64E−06 |
| R17 | SARS-CoV-2 reporter expression | 1.29E−06 |
| R20 | SARS-CoV-2 reporter expression | 7.64E−07 |
| N6 | SARS-CoV-2 reporter expression | 6.51E−07 |
| N7 | SARS-CoV-2 reporter expression | 8.49E−07 |
| R18 | SARS-CoV-2 reporter expression | 1.87E−06 |
| R19 | SARS-CoV-2 reporter expression | 1.60E−04 |
| R21 | SARS-CoV-2 reporter expression | 1.12E−05 |

FIG. 33H (Left) and FIG. 33I (Left)

| | | |
|---|---|---|
| crRNA-NC | SARS-CoV-2 reporter expression | 7.35E−01 |
| R7 | SARS-CoV-2 reporter expression | 2.66E−07 |
| R10 | SARS-CoV-2 reporter expression | 1.62E−07 |
| R7 + R10 | SARS-CoV-2 reporter expression | 1.29E−07 |
| crRNA-NC | mRNA abundance | 8.31E−02 |
| R7 | mRNA abundance | 2.66E−17 |
| R10 | mRNA abundance | 3.13E−17 |
| R7 + R10 | mRNA abundance | 4.01E−18 |

FIG. 33H (Right) and FIG. 33I (Right)

| | | |
|---|---|---|
| crRNA-NC | SARS-CoV-2 reporter expression | 7.36E−01 |
| R14 | SARS-CoV-2 reporter expression | 1.00E−04 |
| N1 | SARS-CoV-2 reporter expression | 5.04E−05 |
| N4 | SARS-CoV-2 reporter expression | 1.21E−04 |
| R14 + N1 + N4 | SARS-CoV-2 reporter expression | 2.95E−05 |
| crRNA-NC | mRNA abundance | 3.60E−01 |
| R14 | mRNA abundance | 1.16E−14 |
| N1 | mRNA abundance | 1.74E−13 |
| N4 | mRNA abundance | 1.42E−11 |
| R14 + N1 + N4 | mRNA abundance | 6.46E−15 |

TABLE 10
Primers used in qRT-PCR. Related to FIG. 33

| | | SEQ ID NO: |
|---|---|---|
| SARS-COV-2-F1_F | aacgggtttgcggtgtaagt | 13731 |
| SARS-COV-2-F1_R | aatttagcaaaaccagctactttatcattgtag | 13732 |
| SARS-COV-2-F2_F | caggtggaacctcatcaggag | 13733 |
| SARS-COV-2-F2_R | gttaccatcagtagataaaagtgcattaacattg | 13734 |
| GAPDH_F | tgcaccaccaactgcttagc | 13735 |
| GAPDH R | ggcatggactgtggtcatgag | 13736 |

### Example 21. Optimized crRNAs Targeting SARS-CoV-2 Sequences Using COMBAT

[0635] Finally, a minipool of 5 highly efficient crRNAs (crRNA-MP5) targeting the SARS-CoV-2 genome was determined. Using SARS-CoV-2 reporters, it was confirmed that individual crRNAs may repress GFP up to 90% (FIG. 33H), with an 85% repression of RNA abundance (FIG. 33I). Pooling these crRNAs further enhanced repression up to 95% for GFP expression and 93% for RNA abundance. Sequences of 94,017 SARS-CoV-2 isolates from the Global Initiative on Sharing All Influenza Data (GISAID) database (as of 9/05/2020) were further retrieved. Each crRNA in crRNA-MP5 was able to target almost 99% of SARS-CoV-2 isolates, and the crRNA-MP5 together may target all known SARS-CoV-2 strains regardless of the variations in different SARS-CoV-2 clades as identified in Nextstrain (FIG. 33J). The optimized minipool of crRNA-MP5 provided a useful resource to be tested against live SARS-CoV-2 virus in vitro and in vivo in the future.

[0636] The rapid development of CRISPR-Cas13-based antivirals had raised the question of whether the system may be effectively used to broadly target many families of RNA viruses. Here, a comprehensive in silico analysis was performed of using CRISPR-Cas13 to target notable pathogenic viral species and 16 families of human- or animal-infectious RNA viruses in the ViPR database. The integrated crRNA analysis pipeline incorporated multiple existing algorithms that computed the coverage, efficiency, and specificity of crRNAs for RNA virus targeting. It was observed that 10 families of human-infectious viruses may be flexibly targeted by a minipool of 14 crRNAs (SEQ ID NOs: 13651-13664, Table 11) with >90% coverage. In some cases, the crRNAs can comprise nucleic acid sequences of SEQ ID NOs: 13671-13684 (Table 11). The strain number and diversity and segmented genomes was determined as potential determinant factors for the number of crRNAs required for coverage. It also observed that, similar to human-infectious viruses, PAC-MAN may also provide a broad-spectrum antiviral strategy for viruses that infected domestic livestock, thus expanding its potential applications.

TABLE 11
Exemplary crRNA sequences for targeting RNA virus

| | | SEQ ID | | SEQ ID |
|---|---|---|---|---|
| | 14 crRNAs Sequence | NO: | crRNA Target Region | NO: |
| Guide | ACAGCATTCTGTGAAT | 13651 | CTTATAATTCACAGAAT | 13671 |
| 1 | TATAAG | | GCTGT | |
| Guide | TCCCAGCGTCAATATG | 13652 | AAACAGCATATTGACGC | 13672 |
| 2 | CTGTTT | | TGGGA | |
| Guide | AAACACGGACACCCA | 13653 | ACTACTTTGGGTGTCCG | 13673 |
| 3 | AAGTAGT | | TGTTT | |
| Guide | ACGAGACCTCCCGGG | 13654 | CGAGTGCCCCGGGAGGT | 13674 |
| 4 | GCACTCG | | CTCGT | |
| Guide | ATGCCTATAACAAATG | 13655 | TCTGATCATTTGTTATA | 13675 |
| 5 | ATCAGA | | GGCAT | |
| Guide | GGGAGCCAGATTGCG | 13656 | GGGCGATCGCAATCTGG | 13676 |
| 6 | ATCGCCC | | CTCCC | |
| Guide | GAGAATCTCTTCGCCA | 13657 | CACAGTTGGCGAAGAG | 13677 |
| 7 | ACTGTG | | ATTCTC | |
| Guide | ACCTATTTAGGACCGC | 13658 | TGTACGGCGGTCCTAAA | 13678 |
| 8 | CGTACA | | TAGGT | |
| Guide | TTCCCATCATGTTGTA | 13659 | TGTGTGTACAACATGAT | 13679 |
| 9 | CACACA | | GGGAA | |
| Guide | TATAAAAAACTTAGGA | 13660 | CTTTGCTCCTAAGTTTTT | 13680 |
| 10 | GCAAAG | | TATA | |
| Guide | GATGAAGATTAAAAC | 13661 | GATGAAGGTTTTAATCT | 13681 |
| 11 | CTTCATC | | TCATC | |
| Guide | TCTCTCGCGTTTCAGC | 13662 | CAATATGCTGAAACGCG | 13682 |
| 12 | ATATTG | | AGAGA | |
| Guide | ATGTAACACCCCTACA | 13663 | ATCCATTGTAGGGGTGT | 13683 |
| 13 | ATGGAT | | TACAT | |
| Guide | GGGTTGGTTGGATGAA | 13664 | CCTATATTCATCCAACC | 13684 |
| 14 | TATAGG | | AACCC | |

### Example 22. Methods for Performing Experiments Described in Example 15-Example 22

[0637] A General Pipeline for crRNA Analysis

[0638] All RNA virus genomes were retrieved from public databases, including 16 RNA virus families from the Virus Pathogen Database and Analysis Resource (ViPR), human immunodeficiency virus (HIV) from NCBI, and influenza A or B viruses (IAV or IBV) from the Influenza Research Database (IRD) (Table 7).

[0639] The viral genomes were aligned by Multiple Alignment using Fast Fourier Transform (MAFFT) and a 22-nucleotide (nt) sliding window was passed over the alignment. In each window, if there was a 22-nt sequence that appears in >50% of genomes then that sequence was added to the crRNA set. In order to eliminate crRNAs with off-targets in the human genome, Bowtie was used to identify crRNAs that aligned to the human transcriptome with <=2 mismatches; these crRNAs as well as crRNAs with the poly-U (>=4U's) sequence that may prevent crRNA expression were removed from the guide set. All crRNAs were assigned a predicted efficiency score. Cas13 guide design method 1 was described in the paragraph below.

[0640] To assign each crRNA with a predicted efficiency score, a computational tool that generated Cas13 crRNAs and predicted efficiency scores given a single input sequence was used. First, for each viral group was chosen as a representative sequence, which was either a NCBI reference sequence if one existed in the viral group, otherwise a random sequence from the viral group. The Cas13 Guide Design Tool was used to generate crRNAs against this reference sequence. Because all crRNAs were 22 nt, in contrast to the longer crRNAs generated by the tool, each crRNA was assigned the average score of all output crRNAs of which it was a substring.

[0641] Species-specific crRNAs referred to those crRNAs that targeted conserved regions in a group of closely related viral genomes. The viruses in a group may be members of the same viral genus (e.g. betacoronaviruses), species (e.g. SARS-CoV-2 patient isolates), or may be members of the same viral family that shared a common host organism (e.g. all human-infecting coronaviruses).

[0642] The mini pool of family-covering crRNAs was determined through an iterative process. The crRNAs were ranked by the number of unique genomes they appear in and the crRNA that targeted most genomes was added to the list. The process was repeated, and the crRNAs were ranked by the number of unique genomes that were not already targeted. If multiple crRNAs were tied in a step, the crRNA with the fewest 3-mer repeats (e.g., “AAA” or “GGG”) was selected. The process ended when every virus strain in the family was targeted by at least one crRNA in the list. Note that the ordering of crRNAs in the list was significant; necessarily, the first crRNA in the list would target the largest number of virus strains.

### Format of Dataset in COMBAT Server

[0643] The downloadable file format of crRNAs is a CSV file, in which each crRNA was annotated with its genomic sequence, spacer DNA for synthesis, % GC content, and additional features. Family-covering crRNAs were annotated by the cumulative percentage of sequences in the virus family that may be targeted by this crRNA and preceding crRNAs in the list. The cumulative percentage of sequences targeted by the last crRNA in the list will be 100%. Users may click on coding sequences of interest to selectively download guides targeting those regions. A link to the iTOL website for each phylogenetic tree was included to enable users to interact with the tree.

### SARS-CoV-2 Targeting in COMBAT

[0644] A focused webpage was developed for users to access crRNAs targeting SARS-CoV-2 and the coronavirus family (FIG. 32A, FIG. 32B, and FIG. 32C; http://crispr-combat.stanford.edu/sarscov2). This webpage hosts: 1) species-specific crRNAs targeting conserved regions of SARS-CoV-2, 2) a coronavirus-covering crRNA minipool that collectively target all sequenced coronaviruses, and 3) custom crRNAs that can target both SARS-CoV-2 and another virus species, such as SARS-Cov or MERS-CoV. Because new sequences of SARS-CoV-2 patient isolates are frequently released, these crRNA sets are frequently updated. This page also highlights experimental validation data for SARS-CoV-2 crRNAs.

### Cell Culture

[0645] All cell lines were incubated at 37° C. and at 5% CO2. Human embryonic kidney (HEK293T) cells and A549 cells (ATCC CCL-185) were cultured in 10% fetal bovine serum (Thermo Fisher Scientific) in DMEM (Thermo Fisher Scientific).

Design and Cloning of RdRP- and N-Targeting crRNAs

[0646] The crRNA plasmids were cloned using standard restriction-ligation cloning. Forward and reverse oligos for each spacer (IDT) were annealed and inserted into the backbone using T4 DNA Ligase (NEB). Assembled oligos were either inserted into a pHR backbone, obtained and modified from Addgene (#121514 and #109054, respectively). Spacer sequences for all crRNAs can be found in Table 8.

### Design and Cloning of SARS-CoV-2 Reporters

[0647] To clone SARS-CoV-2 reporters, pHR-PGK-scFv GCN4-sfGFP (pSLQ1711) was digested with EcoR1 and Sbf1 and gel purified. The PGK promoter and sfGFP were PCR amplified from pSLQ1711 and gel purified. The SARS-CoV-2-F1 and SARS-CoV-2-F2 fragments were synthesized from Integrated DNA Technologies (IDT). At last, the PGK, sfGFP, and SARS-CoV-2-F1/F2 fragments were inserted into the linearized pSLQ1711 vector using In-Fusion cloning (Takara Bio).

### Lentiviral Packaging and Stable Cell Line Generation

[0648] On day 1, HEK293T cells were seeded into 100 mm dishes (Corning). On day 2, cells were ˜50-70% confluent at the time of transfection. For each dish, 6 μg of pHR vector containing the construct of interest, 4 μg of dR8.91 and 1 μg of pMD2.G (Addgene) were mixed in 1 mL of Opti-MEM reduced serum media (Gibco) with 30 μL of Mirus TransIT-LT1 reagent and incubated at room temperature for 30 minutes. The transfection complex solution was distributed evenly to HEK293T cultures dropwise. On day 5, lentiviruses are harvested from the supernatant with a sterile syringe and filtered through a 0.22-μm polyvinylidene fluoride filter (Millipore).

[0649] For A549 cells, lentivirus precipitation solution (Alstem) was added and precipitated as per the manufacturer's protocol. One well of a 6-well plate (Corning) of A549 cells at ˜50% confluency was transduced with the precipitated lentivirus. After 2-3 days of growth, the cell supernatant containing the virus was removed and the cells were expanded. Cells were then sorted for mCherry+ cells using a Sony SH800S cell sorter.

### SARS-CoV-2 Reporter Challenge Experiments

[0650] On day 1, A549 cells stably expressing Cas13d (hereafter referred to as Cas13d A549) were seeded at a density of 80,000 cells per well in a 12-well plate. On day 2, Cas13d A549 cells were transfected with crRNAs targeting the two SARS-CoV-2 reporters or a non-targeting crRNA along with the respective SARS-CoV-2 reporters in an equimolar ratio using Mirus LT1 reagent (100 μL Opti-MEM reduced serum media. 0.5 μg crRNA, 1 μg SARS-CoV-2 reporter, 4 μL Mirus LT1 per well). Wildtype cells were transfected with either the crRNA or SARS-CoV-2 reporter plasmids as compensation controls. GFP expression was measured on day 4 by flow cytometry on a Beckman-Coulter CytoFLEX S instrument. Data was analyzed using FlowJo v10. All p values are available in Table 9.

Quantitative RT-PCR (qRT-PCR)

[0651] Real-time qRT-PCR was performed to quantify RNA abundance. For each sample, total RNA was isolated by using the RNeasy Plus Mini Kit (Qiagen Cat #74134), followed by cDNA synthesis using the iScript cDNA Synthesis Kit (BioRad. Cat #1708890). qRT-PCR primers were ordered from Integrated DNA Technologies (IDT). Quantitative PCR was performed using the PrimePCR assay with the SYBR Green Master Mix (BioRad) and run on a Biorad CFX384 real-time system (C1000 Touch Thermal Cycler), according to manufacturers' instructions. Cq values were used to quantify RNA abundance. The relative abundance of the SARS-CoV-2 fragments was normalized to a GAPDH internal control. Primers used in qPCR are available in Table 10.

### Example 23. Targeting and Cleaving Viral Genome or Viral Transcript with Different Heterologous Endonuclease

[0652] Described herein are systems and methods for targeting and cleaving viral genomes or transcripts of viral genomes. In some cases, the viral genomes or viral transcripts are associated with any one of the strain of virus described herein. In some embodiments, the systems and methods can target and cleave a plurality of viral genomes or viral transcripts of plurality of strains of virus. In some embodiments, the systems and methods described herein utilize heterologous RNA polynucleotide to guide the heterologous endonuclease to the target viral genomes or viral transcripts. In some embodiments, the systems and methods described herein utilize heterologous endonuclease that targets and cleaves the viral genomes or transcripts of viral genomes independent of the heterologous RNA polynucleotide. In some embodiments, the systems and methods described herein utilize a plurality of different heterologous endonucleases (e.g., TALENs in conjunction with CRISPR/Cas). In some embodiments, the plurality of different heterologous endonuclease can be designed to target different viral genes of a virus (e.g., coronavirus) or different genes of different viruses (e.g., Coronaviridae or Pneumoviridae) and regulate (e.g., reduce) viral infection in a cell.

[0653] While the foregoing disclosure has been described in some detail for purposes of clarity and understanding, it will be clear to one skilled in the art from a reading of this disclosure that various changes in form and detail can be made without departing from the true scope of the disclosure. For example, all the techniques and apparatus described above can be used in various combinations. All publications, patents, patent applications, and/or other documents cited in this application are incorporated by reference in their entirety for all purposes to the same extent as if each individual publication, patent, patent application, and/or other document were individually and separately indicated to be incorporated by reference for all purposes.

What is claimed is:

1. A system for reducing viral infection in a cell, comprising:
(1) a heterologous polypeptide comprising a gene regulating moiety; or
(2) one or more heterologous nucleic acid molecules,
wherein at least the gene regulating moiety or the one or more heterologous nucleic acid molecules are configured to specifically bind one or more target viral genes of a coronavirus in the cell, to reduce expression or activity of the one or more target viral genes of the coronavirus in the cell, and
wherein the one or more target viral genes encode (i) a viral RNA-dependent RNA polymerase (RdRP) or (ii) a viral nucleocapsid protein (N-protein).

2. The system of claim 1, wherein the one or more heterologous nucleic acid molecules comprises a plurality of different heterologous nucleic acid molecules that is collectively configured to bind (i) different portions of a same target viral gene of the coronavirus or (ii) different target viral genes of the coronavirus.

3. The system of claim 2, wherein the plurality of different heterologous nucleic acid molecules comprises at least 3, 4, 5, or 6 different heterologous nucleic acid molecules.

4. The system of any one of the preceding claims, wherein a heterologous nucleic acid molecule of the one or more heterologous nucleic acid molecules exhibits at most 3, 2, or 1 mismatch(es) when optimally aligned with a MERS-CoV genome or a SARS-CoV genome.

5. The system of any one of the preceding claims, wherein a heterologous nucleic acid molecule of the one or more heterologous nucleic acid molecules has at least about 80%, 85%, 90%, 95%, or 99% sequence identity or complementarity to a sequence selected from the group consisting of SEQ ID NOs: 4001-7203, 12101-12140, and 13101-13122.

6. The system of any one of the preceding claims, wherein the one or more target viral genes comprise a plurality of target viral genes encoding (i) the viral RdRP and (ii) the N-protein.

7. The system of any one of the preceding claims, wherein the system is sufficient to reduce expression or activity level of the RdRP in the cell by at least about 70% or 75%, as compared to a corresponding control.

8. The system of any one of the preceding claims, wherein the system is sufficient to reduce expression or activity level of the N-protein in the cell by at least about 70%, 75%, 80%, or 85%, as compared to a corresponding control.

9. The system of any one of the preceding claims, wherein the system is sufficient to reduce infection of at least about 30%, 35%, 40%, 50%, 60%, 70%, 80%, or 85% of a plurality of different strains of the coronavirus, as compared to a corresponding control.

10. The system of claim 9, wherein the plurality of different strains of the coronavirus comprises at least one strain from a member selected from the group consisting of alphacoronavirus, betacoronavirus, deltacoronavirus, and gammacoronavirus.

11. The system of claim 9, wherein the plurality of different strains of the coronavirus comprises at least one strain from each of two, three, or four members selected from the group consisting of alphacoronavirus, betacoronavirus, deltacoronavirus, and gammacoronavirus.

12. The system of any one of claims 9-11, wherein the plurality of different strains of the coronavirus comprises at least about 100, 500, 1000, 1500, 2000, or 2500 different strains.

13. The system of claim 1, wherein at least the gene regulating moiety is configured to specifically bind the one or more target viral genes of the coronavirus in the cell.

14. The system of claim 1, wherein at least the one or more heterologous nucleic acid molecules are configured to specifically bind the one or more target viral genes of the coronavirus in the cell.

15. The system of claim 1, wherein the gene regulating moiety and the one or more heterologous nucleic acid molecules are collectively configured to specifically bind the one or more target viral genes of the coronavirus in the cell.

16. The system of claim 15, wherein the gene regulating moiety is configured to form a complex with the one or more heterologous nucleic acid molecules, the complex being configured to bind the one or more target viral genes.

17. A system for reducing viral infection in a cell, comprising:
(1) a heterologous polypeptide comprising a gene regulating moiety; or
(2) one or more heterologous nucleic acid molecules,
wherein at least the gene regulating moiety or the one or more heterologous nucleic acid molecules are configured to specifically bind one or more non-coding regions of at least one target viral gene in the cell, to reduce expression or activity of the at least one target viral gene in the cell.

18. The system of claim 17, wherein the one or more heterologous nucleic acid molecules comprises a plurality of different heterologous nucleic acid molecules that is collectively configured to bind a plurality of different non-coding regions of the at least one target viral gene.

19. The system of claim 18, wherein the plurality of different non-coding regions is operatively coupled to a same target viral gene.

20. The system of claim 19, wherein a viral sequence encoding a viral protein is flanked by the plurality of different non-coding regions.

21. The system of claim 19 or 20, wherein the same target viral gene encodes a neuraminidase.

22. The system of claim 19 or 20, wherein the same target viral gene encodes a hemagglutinin.

23. The system of claim 18, wherein the plurality of different non-coding regions is operatively coupled to different target viral genes.

24. The system of claim 23, wherein (i) a first target viral gene of the different target viral genes encodes a neuraminidase and (ii) a second target viral gene of the different target viral genes encodes a viral protein selected from the group consisting of a polymerase, a hemagglutinin, a nucleoprotein, a matrix protein, a non-structural protein, and a nuclear export protein.

25. The system of claim 23, wherein (i) a first target viral gene of the different target viral genes encodes a hemagglutinin and (ii) a second target viral gene of the different target viral genes encodes a viral protein selected from the group consisting of a polymerase, a nucleoprotein, a matrix protein, a non-structural protein, and a nuclear export protein.

26. The system of any one of claims 18-25, wherein the plurality of different heterologous nucleic acid molecules comprises at least 3, 4, 5, or 6 different heterologous nucleic acid molecules.

27. The system of any one of claims 17-26, wherein at least one target viral gene is from an influenza virus.

28. The system of any one of claims 17-27, wherein one or more non-coding regions are conserved across a plurality of different influenza virus strains.

29. The system of claim 28, wherein the plurality of different influenza virus strains comprises at least one strain from a member selected from the group consisting of influenza A, influenza B, influenza C, and influenza D.

30. The system of claim 29, wherein the plurality of different influenza virus strains comprises subtypes of influenza A.

31. The system of claim 29, wherein the plurality of different influenza virus strains comprises at least one strain from each of two, three, or four members selected from the group consisting of influenza A, influenza B, influenza C, and influenza D.

32. The system of any one of claims 28-31, wherein the plurality of different influenza virus strains comprises at least about 10, 20, 50, 100, or 120 different influenza virus strains.

33. The system of any one of claims 17-32, wherein the one or more non-coding regions comprise a sequence having at least about 80%, 85%, 90%, 95%, or 99% sequence identity or complementarity to a sequence selected from the group consisting of SEQ ID NOs: 13501-13548.

34. The system of any one of claims 17-33, wherein the system is sufficient to reduce infection of an influenza virus in the cell by at least about 50%, 55%, 60%, 65%, or 70%, as compared to a corresponding control.

35. The system of claim 17, wherein at least the gene regulating moiety is configured to specifically bind the one or more non-coding regions of the at least one target viral gene.

36. The system of claim 17, wherein at least the one or more heterologous nucleic acid molecules are configured to specifically bind the one or more non-coding regions of the at least one target viral gene.

37. The system of claim 17, wherein the gene regulating moiety and the one or more heterologous nucleic acid molecules are collectively configured to specifically bind the one or more non-coding regions of the at least one target viral gene.

38. The system of claim 37, wherein the gene regulating moiety is configured to form a complex with the one or more heterologous nucleic acid molecules, the complex being configured to bind the one or more non-coding regions of the at least one target viral gene.

39. A system for reducing viral infection in a cell, comprising:
(1) a plurality of heterologous gene regulating moieties that comprises no more than 20 members: or
(2) a plurality of heterologous nucleic acid molecules that comprises no more than 20 members:
wherein the plurality of heterologous gene regulating moieties or the plurality of heterologous nucleic acid molecules is configured to specifically bind at least about 70% of a plurality of strains from a plurality of RNA virus families.

40. The system of claim 39, wherein the plurality of strains comprises at least about 1000, 5000, 10000, 15000, 20000, or 22000 different strains.

41. The system of claim 39 or 40, wherein the specific binding is to at least about 75%, 80%, 85%, or 90% of the plurality of strains from the plurality of RNA virus families.

42. The system of any one of claims 39-41, wherein the plurality of RNA virus families comprises two or members selected from the group consisting of Coronaviridae, Pneumoviridae, Paramyxoviridae, Caliciviridae, Hepeviridae, Picomaviridae, Filoviridae, Flaviviridae, Rhabdoviridae, Togaviridae, Orthomyxoviridae, and Retroviridae.

43. The system of any one of claims 39-42, wherein the plurality of RNA virus families comprises two or more members selected from the group consisting of Coronaviridae, Pneumoviridae, Paramyxoviridae, Caliciviridae, Hepeviridae, Picomaviridae, Filoviridae, Flaviviridae, Rhabdoviridae, and Togaviridae.

44. The system of any one of claims 39-43, wherein at least the plurality of heterologous gene regulating moieties is configured to specifically bind at least about 700% of the plurality of strains.

45. The system of any one of claims 39-43, wherein at least the plurality of heterologous nucleic acid molecules is configured to specifically bind at least about 70% of the plurality of strains.

46. The system of any one of claims 39-43, wherein at least the plurality of heterologous gene regulating moieties and the plurality of heterologous nucleic acid molecules are collectively configured to specifically bind at least about 70% of the plurality of strains.

47. The system of claim 46, wherein (i) a gene regulating moiety of the plurality of heterologous gene regulating moieties is configured to form a complex with (ii) a heterologous nucleic acid molecule of the plurality of plurality of heterologous nucleic acid molecules, the complex being configured to bind a target viral gene from the plurality of strains.

48. A system for reducing viral infection in a cell, comprising:
(1) a plurality of heterologous gene regulating moieties that comprises no more than 20 members; or
(2) a plurality of heterologous nucleic acid molecules that comprises no more than 20 members;
wherein the plurality of heterologous gene regulating moieties or the plurality of heterologous nucleic acid molecules is configured to specifically bind at least about 30% of a plurality of strains from each RNA virus family of a plurality of RNA virus families.

49. The system of claim 48, wherein the plurality of strains from said each RNA virus family comprises at least about 100, 200, 300, 400, 500, 1,000, 2,000, or more different strains.

50. The system of claim 48 or 49, wherein the specific binding is to at least about 35%, 40%, 45%, or 50% of the plurality of strains from said each RNA virus family.

51. The system of any one of claims 48-50, wherein the specific binding is to at least about 55%, 60%, 65%, 70%, 75%, or 80% of the plurality of strains of one or more RNA virus families selected from the group consisting of Coronaviridae, Pneumoviridae, Caliciviridae, Hepeviridae, Picomaviridae, Filoviridae, Flaviviridae, and Togaviridae.

52. The system of any one of claims 48-51, wherein the specific binding is to at least about 85% of the plurality of strains of one or more RNA virus families selected from the group consisting of Coronaviridae, Pneumoviridae, Hepeviridae, Picomaviridae, Filoviridae, Flaviviridae, and Togaviridae.

53. The system of any one of claims 48-52, wherein at least the plurality of heterologous gene regulating moieties is configured to specifically bind at least about 30% of the plurality of strains.

54. The system of any one of claims 48-52, wherein at least the plurality of heterologous nucleic acid molecules is configured to specifically bind at least about 30% of the plurality of strains.

55. The system of any one of claims 48-52, wherein at least the plurality of heterologous gene regulating moieties and the plurality of heterologous nucleic acid molecules are collectively configured to specifically bind at least about 30% of the plurality of strains.

56. The system of claim 55, wherein (i) a gene regulating moiety of the plurality of heterologous gene regulating moieties is configured to form a complex with (ii) a heterologous nucleic acid molecule of the plurality of plurality of heterologous nucleic acid molecules, the complex being configured to bind a target viral gene from the plurality of strains.

57. The system of any one of claims 39-56, wherein the plurality of RNA virus families is a plurality of human-infectious RNA virus families.

58. The system of claim 57, wherein the plurality of heterologous gene regulating moieties comprises between about 5 and about 20 different members, between about 8 and about 20 different members, between about 10 and about 18 different members, between about 12 and about 16 different members, or between about 13 and about 15 different members.

59. The system of claim 57, wherein the plurality of heterologous gene regulating moieties comprises about 14 different members.

60. The system of any one of claims 57-59, wherein a heterologous gene regulating moiety of the plurality of gene regulating moieties exhibits a specific binding to a target polynucleotide sequence, wherein the target polynucleotide sequence has at least about 50%, 60%, 70%, 80%, 85%, 90%, 95%, or 99% sequence identity or complementarity to a sequence selected from Table 11.

61. The system of any one of claims 39-56, wherein the plurality of heterologous nucleic acid molecules comprises between about 5 and about 20 different members, between about 8 and about 20 different members, between about 10 and about 18 different members, between about 12 and about 16 different members, or between about 13 and about 15 different members.

62. The system of claim 61, wherein the plurality of heterologous nucleic acid molecules comprises about 14 different members.

63. The system of claim 61 or 62, wherein a heterologous nucleic acid molecule of the plurality of heterologous nucleic acid molecules has at least about 50%, 60%, 70%, 80%, 85%, 90%, 95%, or 99% sequence identity or complementarity to a sequence selected from Table 11.

64. The system of any one of the preceding claims, wherein the heterologous nucleic acid molecule(s) has a length ranging from about 10 to about 30 nucleotides.

65. The system of any one of the preceding claims, wherein the heterologous nucleic acid molecule(s) is a heterologous guide RNA molecule.

66. The system of any one of the preceding claims, wherein the gene regulating moiety is a heterologous endonuclease.

67. The system of claim 66, wherein the heterologous endonuclease is an RNA-targeting endonuclease.

68. The system of any one of claims 66-67, wherein the heterologous endonuclease exhibits RNA cleavage activity.

69. The system of any one of claims 66-68, wherein the heterologous endonuclease comprises a CRISPR/Cas protein or a modification thereof.

70. The system of claim 69, wherein the CRISPR/Cas protein is Cas13.

71. The system of claim 70, wherein the CRISPR/Cas protein is Cas13d.

72. The system of any one of the preceding claims, wherein (i) the heterologous polypeptide or a gene encoding thereof or (ii) the heterologous nucleic acid molecule(s) or a gene encoding thereof is packaged in a delivery vehicle selected from the group consisting of a liposome, a nanoparticle, and a viral capsule.

73. A composition comprising (i) the system of any one of the preceding claims or (ii) one or more polynucleotide sequences encoding thereof.

74. A kit comprising the composition of claim 73.

75. A reaction mixture comprising (i) the system of any one of the preceding claims and (ii) a biological sample.

76. The reaction mixture of claim 75, wherein the biological sample is selected from the group consisting of urine, blood, cell, tissue, organ, organism, and a combination thereof.

77. A method of reducing viral infection in a population of cells, the method comprising contacting the population of cells with the system of any one of the preceding claims, wherein upon the contacting, viral infection in the population of cells is reduced.

78. The method of claim 77, wherein the contacting occurs in vivo, ex vivo, or in vitro.

79. The method of claim 77, further comprising expressing, in the population of cells, (i) the system or (ii) one or more polynucleotide sequences encoding thereof.

80. The method of claim 79, further comprising administering (i) the system or (ii) the one or more polynucleotide sequences to a subject in need thereof.

81. The method of claim 77, further comprising, subsequent to the contacting, administering one or more cells of the population of cells to a subject in need thereof.

82. A system for reducing viral infection in a cell, comprising:
(1) a first therapeutic agent configured to specifically bind a target viral gene, the first therapeutic agent comprising:
(i) a heterologous polypeptide comprising a gene regulating moiety; or
(ii) a heterologous nucleic acid molecule; and
(2) a second therapeutic agent that does not specifically bind a viral gene,
wherein a combination of the first and second therapeutic agents reduces viral infection in the cell.

83. The system of claim 82, wherein the combination effects enhanced reduction in the viral infection in the cell by at least about 10%, 20%, 30%, 40%, or 45% as compared to a corresponding control.

84. The system of claim 83, wherein the corresponding control comprises a cell lacking the first therapeutic agent or the second therapeutic agent.

85. The system of claim 83, wherein the corresponding control comprises a cell lacking the second therapeutic agent.

86. The system of any one of claims 82-85, wherein the (i) the first therapeutic agent or a gene encoding thereof and (ii) the second therapeutic agent are in a same composition or in different compositions.

87. The system of any one of claims 82-86, wherein a synergistic effect of the combination on the reduction of the viral replication in the cell is greater than an additive effect of the combination when performed separately.

88. The system of claim 87, wherein a fold decrease in the viral replication from the synergistic effect is greater than that from the additive effect by at least about 1-fold, 2-fold, 3-fold, 4-fold, 6-fold, 8-fold, or 10-fold.

89. The system of any one of claims 82-88, wherein the second therapeutic agent is an immune regulator.

90. The system of claim 89, wherein the immune regulator is a cytokine.

91. The system of claim 90, wherein the cytokine is interferon-gamma.

92. The system of any one of claims 82-88, wherein the second therapeutic agent is an antiviral agent.

93. The system of claim 92, wherein the antiviral agent is a small molecule.

94. The system of claim 92, wherein the antiviral agent is Camostat.

95. The system of any one of claims 82-88, wherein the second therapeutic agent is configured to specifically bind an target endogenous gene of the cell, the target endogenous gene encoding a protein involved in viral infection or replication.

96. The system of claim 95, wherein the protein is a transmembrane protease.

97. The system of claim 96, wherein the transmembrane protease is TMPRSS2.

98. The system of claim 95, wherein the protein is a MTHFD1.

99. The system of claim 95, wherein the protein is a peptidase.

100. The system of claim 95, wherein the protein is an aminopeptidase.

101. The system of claim 95, wherein the protein is ANPEP.

102. The system of any one of claims 95-101, wherein the second therapeutic agent comprises:
(i) an additional heterologous polypeptide comprising an additional gene regulating moiety; or
(ii) an additional heterologous nucleic acid molecule.

103. The system of claim 102, wherein the additional gene regulating moiety is configured to specifically bind the target endogenous gene.

104. The system of claim 102, wherein the additional heterologous nucleic acid molecule is configured to specifically bind the target endogenous gene.

105. The system of claim 102, wherein the additional gene regulating moiety is configured to form a complex with the additional heterologous nucleic acid molecule, the complex being configured to bind the target endogenous gene.

106. The system of claim 105, wherein the additional heterologous nucleic acid molecule is a guide nucleic acid molecule.

107. The system of any one of claims 82-106, wherein the gene regulating moiety is configured to specifically bind the target viral gene.

108. The system of any one of claims 82-106, wherein the heterologous nucleic acid molecule is configured to specifically bind the target viral gene.

109. The system of any one of claims 82-106, wherein the gene regulating moiety is configured to form a complex with the heterologous nucleic acid molecule, the complex being configured to bind the target viral gene.

110. The system of claim 109, wherein the heterologous nucleic acid molecule is a guide nucleic acid molecule.

111. The system of any one of claims 82-110, wherein the guide nucleic acid molecule has a length ranging from about 10 to about 30 nucleotides.

112. The system of any one of claims 82-111, wherein the gene regulating moiety is a heterologous endonuclease.

113. The system of claim 112, wherein the heterologous endonuclease is an RNA-targeting endonuclease.

114. The system of claim 112 or 113, wherein the heterologous endonuclease exhibits RNA cleavage activity.

115. The system of any one of claims 112-114, wherein the heterologous endonuclease comprises a CRISPR/Cas protein or a modification thereof.

116. The system of claim 115, wherein the CRISPR/Cas protein is Cas13.

117. The system of claim 115, wherein the CRISPR/Cas protein is Cas13d.

118. A composition comprising the system of any one of claims 82-117.

119. A kit comprising the composition of claim 118.

120. A reaction mixture comprising (i) the system of any one of claims 82-117 and (ii) a biological sample.

121. The reaction mixture of claim 120, wherein the biological sample is selected from the group consisting of urine, blood, cell, tissue, organ, organism, and a combination thereof.

122. A method for reducing viral infection in a cell, comprising:
(a) contacting the cell with a first therapeutic agent of the system of any one of claims 82-117, the first therapeutic agent comprising:
(i) a heterologous polypeptide comprising a gene regulating moiety; or
(ii) a heterologous nucleic acid molecule; and
(b) contacting the cell with a second therapeutic agent of the system of any one of claims 82-117, wherein a second therapeutic agent that does not specifically bind a viral gene, and wherein contacting the cell with the first and second therapeutic agents reduces viral infection in the cell.

123. The method of claim 122, wherein (a) is performed prior to, simultaneously with, or subsequent to (b).

124. The method of claim 122, wherein the contacting in (a) and (b) occurs in vivo, ex vivo, or in vitro.

125. The method of claim 122, further comprising administering (i) the system or (ii) one or more polynucleotide sequences encoding the system to a subject in need thereof, wherein the subject comprises the cell.

126. The method of claim 122, further comprising, subsequent to (b), administering the cell to a subject in need thereof.

127. The method of claim 130, wherein the first therapeutic agent and the second therapeutic agent are in a same composition or separate compositions.

128. A system for reducing viral infection in a cell, comprising:
(1) a heterologous polypeptide comprising a gene regulating moiety that is operatively coupled to a nuclear localization signal (NLS) (gene regulating moiety-NLS); and
(2) a heterologous polynucleotide sequence encoding a guide nucleic acid molecule,
wherein, upon expression of the guide nucleic acid molecule from the heterologous polynucleotide sequence in the cell, the gene regulating moiety-NLS forms a complex with the guide nucleic acid molecule, the complex being configured to bind a target viral gene to reduce the viral infection in the cell.

129. The system of claim 128, wherein the heterologous polynucleotide sequence is not integrated into a genome of the cell.

130. The system of claim 128 or 129, wherein the binding effects reduction of the viral infection in the cell by at least about 10%, 20%, 30%, 40%, or 50%, as compared to a corresponding control.

131. The system of claim 130, wherein the corresponding control comprises a cell that comprises (i) a gene regulating moiety in absence of the NLS and (ii) the heterologous polynucleotide sequence encoding the guide nucleic acid molecule.

132. The system of claim 131, wherein, in the corresponding control, the gene regulating moiety is operatively coupled to a nuclear export signal (NES).

133. The system of any one of claims 128-132, the viral infection is viral replication in the cell.

134. The system of any one of claims 128-133, wherein the guide nucleic acid molecule is a guide RNA molecule.

135. The system of any one of claims 128-134, wherein the guide nucleic acid molecule has a length ranging from about 10 to about 30 nucleotides.

136. The system of any one of claims 128-135, wherein the gene regulating moiety is a heterologous endonuclease.

137. The system of claim 136, wherein the heterologous endonuclease is an RNA-targeting endonuclease.

138. The system of claim 136 or 137, wherein the heterologous endonuclease exhibits RNA cleavage activity.

139. The system of any one of claims 136-138, wherein the heterologous endonuclease comprises a CRISPR/Cas protein or a modification thereof.

140. The system of claim 139, wherein the CRISPR/Cas protein is Cas13.

141. The system of claim 139, wherein the CRISPR/Cas protein is Cas13d.

142. The system of any one of claims 128-141, wherein heterologous polynucleotide sequence is part of a non-replicating viral vector.

143. A composition comprising the system of any one of claims 128-142.

144. A kit comprising the composition of claim 143.

145. A reaction mixture comprising (i) the system of any one of claims 128-142 and (ii) a biological sample.

146. The reaction mixture of claim 145, wherein the biological sample is selected from the group consisting of urine, blood, cell, tissue, organ, organism, and a combination thereof.

147. A method for reducing viral infection in a cell, comprising:
(a) contacting the cell with the system of any one of claims 128-142, the system comprising:
(1) a heterologous polypeptide comprising a gene regulating moiety that is operatively coupled to a nuclear localization signal (NLS) (gene regulating moiety-NLS); and
(2) a heterologous polynucleotide sequence encoding a guide nucleic acid molecule; and
(b) expressing the guide nucleic acid molecule in the cell from the heterologous polynucleotide sequence,
wherein, upon the expressing, the gene regulating moiety-NLS forms a complex with the guide nucleic acid molecule, and the complex binds a target viral gene to reduce the viral infection in the cell.

148. The method of claim 147, wherein the contacting occurs in vivo, ex vivo, or in vitro.

149. The method of claim 147, further comprising administering (i) the system or (ii) one or more polynucleotide sequences encoding the system to a subject in need thereof, wherein the subject comprises the cell.

150. The method of claim 147, further comprising, subsequent to (a) and (b), administering the cell to a subject in need thereof.

151. A nucleic acid composition comprising a RNA-binding guide RNA, wherein the RNA-binding guide RNA comprises a targeting sequence that has a length ranging between about 10 to about 30 nucleotides and is characterized by one or more members selected from the group consisting of:
(i) the targeting sequence exhibits at least about 80% sequence identity or complementarity to any one of SEQ ID NOs: 4001-7203, 12101-12140, and 13101-13122:
(ii) the targeting sequence is configured to bind a polynucleotide fragment within a coronavirus genome, wherein the polynucleotide fragment has a length of between about 10 and about 30 nucleotides and exhibits at least about 80% sequence identity or complementarity to a conserved region of the coronavirus genome that encodes (1) a RNA-dependent RNA polymerase (RdRP) (2) a nucleocapsid protein (N-protein); and
(iii) the targeting sequence comprises at most 3 mismatches when optimally aligned with a MERS-CoV genome or a SARS-CoV genome.

152. The nucleic acid composition of claim 151, wherein the targeting sequence exhibits at least about 80%, 85%, 90%, 95%, or 99% sequence identity or complementarity to any one of SEQ ID NOs: 4001-7203, 12101-12140, and 13101-13122.

153. The nucleic acid composition of claim 152, wherein the targeting sequence exhibits at least about 80%, 85%, 90%, 95%, or 99% sequence identity or complementarity to any one of SEQ ID NOs: 4001-7203.

154. The nucleic acid composition of claim 152, wherein the targeting sequence exhibits at least about 80%, 85%, 90%, 95%, or 99% sequence identity or complementarity to any one of SEQ ID NOs: 12101-12140.

155. The nucleic acid composition of claim 152, wherein the targeting sequence exhibits at least about 80%, 85%, 90%, 95%, or 99% sequence identity or complementarity to any one of SEQ ID NOs: 13101-13122.

156. The nucleic acid composition of claim 155, wherein the targeting sequence exhibits at least about 80%, 85%, 90%, 95%, or 99% sequence identity or complementarity to any one of SEQ ID NO: 13101-13106.

157. The nucleic acid composition of claim 151, wherein targeting sequence is configured to bind the polynucleotide fragment within the coronavirus genome, wherein the polynucleotide fragment has a length of between about 10 and about 30 nucleotides and exhibits at least about 80%, 85%, 90%, 95%, or 99% sequence identity or complementarity to the conserved region of the coronavirus genome that encodes (1) the RdRP or (2) the N-protein.

158. The nucleic acid composition of claim 151, wherein the targeting sequence comprises at most 3, 2, or 1 mismatch(es) when optimally aligned with the MERS-CoV genome or the SARS-CoV genome.

159. The nucleic acid composition of any one of the preceding claims, wherein a mismatch is an insertion or a deletion.

160. The nucleic acid composition of any one of the preceding claims, wherein the nucleic acid composition is characterized by two or more members selected from the group consisting of (i), (ii), and (iii).

161. The nucleic acid composition of any one of the preceding claims, wherein the nucleic acid composition is characterized by all of (i), (ii), and (iii).

162. The nucleic acid composition of any one of the preceding claims, comprising a plurality of different RNA-binding guide RNAs comprising the RNA-binding guide RNA, wherein each of the plurality of different RNA-binding guide RNAs is characterized by one or more members selected from the group consisting of (i), (ii), and (iii).

163. The nucleic acid composition of any one of the preceding claims, wherein each of the plurality of different RNA-binding guide RNAs is characterized by two or more members selected from the group consisting of (i), (ii), and (iii).

164. The nucleic acid composition of any one of the preceding claims, wherein each of the plurality of different RNA-binding guide RNAs is characterized by all of (i), (ii), and (iii).

165. The nucleic acid composition of any one of the preceding claims, wherein the plurality of different RNA-binding guide RNAs comprises at least 3, 4, 5, or 6 different RNA-binding guide RNAs.

166. A nucleic acid composition comprising a plurality of different RNA-binding guide RNAs, wherein no more than six members of the plurality collectively exhibits specific binding to at least about 50% of a plurality of different strains of coronaviruses selected from the group consisting of alphacoronavirus, betacoronavirus, deltacoronavirus, and gammacoronavirus.

167. A nucleic acid composition comprising a plurality of different RNA-binding guide RNAs, wherein no more than six members of the plurality collectively exhibits specific binding to at least about 50% of a plurality of different strains of coronaviruses selected from the group consisting of coronaviruses as identified by GenBank Access ID.

168. The nucleic acid composition of any one of claims 166-167, wherein the specific binding is to at least about 50%, 60%, 70%, 80%, 85%, 90%, 95%, or 99% of the plurality of different strains.

169. The nucleic acid composition of any one of claims 166-168, wherein the plurality of different strains of the coronavirus comprises at least about 100, 500, 1000, 1500, 2000, or 2500 different strains.

170. The nucleic acid composition of any one of claims 166-169, wherein the plurality of different strains of the coronavirus comprises at least one strain from each of two, three, or four members selected from the group consisting of alphacoronavirus, betacoronavirus, deltacoronavirus, and gammacoronavirus.

171. The nucleic acid composition of any one of claims 166-170, wherein the plurality of different RNA-binding guide RNAs is selected from the group consisting of the sequences in Table 4.

172. A nucleic acid composition comprising one or more RNA-binding guide RNAs, wherein a RNA-binding guide RNA of the one or more RNA-binding guide RNAs comprises a targeting sequence that has a length ranging between about 10 to about 30, and wherein the RNA-binding guide RNA has at least about 80% sequence identity or complementarity to any one of SEQ ID NOs: 13301-13348.

173. The nucleic acid composition of claim 172, wherein the RNA-binding guide RNA has at least about 85%, 90%, 95%, or 99% sequence identity or complementarity to any one of SEQ ID NOs: 13301-13348.

174. The nucleic acid composition of claim 172, wherein the RNA-binding guide RNA has at least about 80%, 85%, 90%, 95%, or 99% sequence identity or complementarity to any one of SEQ ID NOs: 13319-13324 and 13331-13336.

175. The nucleic acid composition of any one of claims 172-174, wherein the one or more RNA-binding guide RNAs comprise a plurality of different RNA-binding guide RNAs.

176. The nucleic acid composition of claim 175, wherein the plurality of different RNA-binding guide RNAs comprises between about two and about eight different RNA-binding guide RNAs.

177. The nucleic acid composition of claim 175, wherein the plurality of different RNA-binding guide RNAs comprises between about four and about eight different RNA-binding guide RNAs.

178. The nucleic acid composition of claim 175, wherein the plurality of different RNA-binding guide RNAs comprises between about five and about seven different RNA-binding guide RNAs.

179. The nucleic acid composition of claim 175, wherein the plurality of different RNA-binding guide RNAs comprises about six different RNA-binding guide RNAs.

180. The nucleic acid composition of any one of claims 175-179, wherein the plurality of different RNA-binding guide RNAs comprises (i) a first RNA-binding guide RNA having at least about 80%, 85%, 90%, 95%, or 99% sequence identity or complementarity to any one of SEQ ID NOs: 13319-13324 or (ii) a second RNA-binding guide RNA having at least about 80%, 85%, 90%, 95%, or 99% sequence identity or complementarity to any one of SEQ ID NOs: 13331-13336.

181. The nucleic acid composition of claim 180, wherein the plurality of different RNA-binding guide RNAs comprises the first RNA-binding guide RNA and the second RNA-binding guide RNA.

182. A nucleic acid composition comprising one or more RNA-binding guide RNAs, wherein a RNA-binding guide RNA of the one or more RNA-binding guide RNAs comprises a targeting sequence that has a length ranging between about 10 to about 30, and wherein the RNA-binding guide RNA has at least about 80% sequence identity or complementarity to a sequence selected from Table 11.

183. The nucleic acid composition of claim 182, wherein the RNA-binding guide RNA has at least about 85%, 90%, 95%, or 99% sequence identity or complementarity to a sequence selected from Table 11.

184. The nucleic acid composition of any one of claims 182-183, wherein the one or more RNA-binding guide RNAs comprise a plurality of different RNA-binding guide RNAs.

185. The nucleic acid composition of claim 184, wherein the plurality of different RNA-binding guide RNAs comprises between about 5 and about 20 different RNA-binding guide RNAs.

186. The nucleic acid composition of claim 184, wherein the plurality of different RNA-binding guide RNAs comprises between about 8 and about 20 different RNA-binding guide RNAs.

187. The nucleic acid composition of claim 184, wherein the plurality of different RNA-binding guide RNAs comprises between about 10 and about 18 different RNA-binding guide RNAs.

188. The nucleic acid composition of claim 184, wherein the plurality of different RNA-binding guide RNAs comprises between about 12 and about 16 different RNA-binding guide RNAs.

189. The nucleic acid composition of claim 184, wherein the plurality of different RNA-binding guide RNAs comprises about 14 different RNA-binding guide RNAs.

The application's sequence listing, which the Patent Office published only in electronic form, follows.

SEQUENCE LISTING (13740 sequences)

SEQ ID NO: 1 - DNA, 22 bp, Artificial Sequence
  Description of Artificial Sequence: Synthetic oligonucleotide
tcatcaaataagtagtatgtag

SEQ ID NO: 2 - DNA, 22 bp, Artificial Sequence
  Description of Artificial Sequence: Synthetic oligonucleotide
catcaaataagtagtatgtagc

SEQ ID NO: 3 - DNA, 22 bp, Artificial Sequence
  Description of Artificial Sequence: Synthetic oligonucleotide
aaacactattagcataagcagt

SEQ ID NO: 4 - DNA, 22 bp, Artificial Sequence
  Description of Artificial Sequence: Synthetic oligonucleotide
aaaacactattagcataagcag

SEQ ID NO: 5 - DNA, 22 bp, Artificial Sequence
  Description of Artificial Sequence: Synthetic oligonucleotide
tattagcataagcagttgtggc

SEQ ID NO: 6 - DNA, 22 bp, Artificial Sequence
  Description of Artificial Sequence: Synthetic oligonucleotide
ctattagcataagcagttgtgg

SEQ ID NO: 7 - DNA, 22 bp, Artificial Sequence
  Description of Artificial Sequence: Synthetic oligonucleotide
ttagcataagcagttgtggcat

SEQ ID NO: 8 - DNA, 22 bp, Artificial Sequence
  Description of Artificial Sequence: Synthetic oligonucleotide
attagcataagcagttgtggca

SEQ ID NO: 9 - DNA, 22 bp, Artificial Sequence
  Description of Artificial Sequence: Synthetic oligonucleotide
acactattagcataagcagttg

SEQ ID NO: 10 - DNA, 22 bp, Artificial Sequence
  Description of Artificial Sequence: Synthetic oligonucleotide
aacactattagcataagcagtt

SEQ ID NO: 11 - DNA, 22 bp, Artificial Sequence
  Description of Artificial Sequence: Synthetic oligonucleotide
actattagcataagcagttgtg

SEQ ID NO: 12 - DNA, 22 bp, Artificial Sequence
  Description of Artificial Sequence: Synthetic oligonucleotide
cactattagcataagcagttgt

SEQ ID NO: 13 - DNA, 22 bp, Artificial Sequence
  Description of Artificial Sequence: Synthetic oligonucleotide
cgatatgttcgaaggcatagcc

SEQ ID NO: 14 - DNA, 22 bp, Artificial Sequence
  Description of Artificial Sequence: Synthetic oligonucleotide
acgatatgttcgaaggcatagc

SEQ ID NO: 15 - DNA, 22 bp, Artificial Sequence
  Description of Artificial Sequence: Synthetic oligonucleotide
tctagccttaccccatttatta

SEQ ID NO: 16 - DNA, 22 bp, Artificial Sequence
  Description of Artificial Sequence: Synthetic oligonucleotide
ctagccttaccccatttattaa

SEQ ID NO: 17 - DNA, 22 bp, Artificial Sequence
  Description of Artificial Sequence: Synthetic oligonucleotide
tagccttaccccatttattaaa

SEQ ID NO: 18 - DNA, 22 bp, Artificial Sequence
  Description of Artificial Sequence: Synthetic oligonucleotide
agccttaccccatttattaaat

SEQ ID NO: 19 - DNA, 22 bp, Artificial Sequence
  Description of Artificial Sequence: Synthetic oligonucleotide
gccttaccccatttattaaatg

SEQ ID NO: 20 - DNA, 22 bp, Artificial Sequence
  Description of Artificial Sequence: Synthetic oligonucleotide
ccttaccccatttattaaatgg

SEQ ID NO: 21 - DNA, 22 bp, Artificial Sequence
  Description of Artificial Sequence: Synthetic oligonucleotide
cttaccccatttattaaatgga

SEQ ID NO: 22 - DNA, 22 bp, Artificial Sequence
  Description of Artificial Sequence: Synthetic oligonucleotide
ttaccccatttattaaatggaa

SEQ ID NO: 23 - DNA, 22 bp, Artificial Sequence
  Description of Artificial Sequence: Synthetic oligonucleotide
agtctagccttaccccatttat

SEQ ID NO: 24 - DNA, 22 bp, Artificial Sequence
  Description of Artificial Sequence: Synthetic oligonucleotide
gtctagccttaccccatttatt

SEQ ID NO: 25 - DNA, 22 bp, Artificial Sequence
  Description of Artificial Sequence: Synthetic oligonucleotide
gtatgcggtgtgtacatagcct

SEQ ID NO: 26 - DNA, 22 bp, Artificial Sequence
  Description of Artificial Sequence: Synthetic oligonucleotide
tgtatgcggtgtgtacatagcc

SEQ ID NO: 27 - DNA, 22 bp, Artificial Sequence
  Description of Artificial Sequence: Synthetic oligonucleotide
ctgtatgcggtgtgtacatagc

SEQ ID NO: 28 - DNA, 22 bp, Artificial Sequence
  Description of Artificial Sequence: Synthetic oligonucleotide
actgtatgcggtgtgtacatag

SEQ ID NO: 29 - DNA, 22 bp, Artificial Sequence
  Description of Artificial Sequence: Synthetic oligonucleotide
gactgtatgcggtgtgtacata

SEQ ID NO: 30 - DNA, 22 bp, Artificial Sequence
  Description of Artificial Sequence: Synthetic oligonucleotide
agactgtatgcggtgtgtacat

SEQ ID NO: 31 - DNA, 22 bp, Artificial Sequence
  Description of Artificial Sequence: Synthetic oligonucleotide
aagactgtatgcggtgtgtaca

SEQ ID NO: 32 - DNA, 22 bp, Artificial Sequence
  Description of Artificial Sequence: Synthetic oligonucleotide
cagccataacctttccacatac

SEQ ID NO: 33 - DNA, 22 bp, Artificial Sequence
  Description of Artificial Sequence: Synthetic oligonucleotide
agccataacctttccacatacc

SEQ ID NO: 34 - DNA, 22 bp, Artificial Sequence
  Description of Artificial Sequence: Synthetic oligonucleotide
cctttccacataccgcagacgg

SEQ ID NO: 35 - DNA, 22 bp, Artificial Sequence
  Description of Artificial Sequence: Synthetic oligonucleotide
aacctttccacataccgcagac

SEQ ID NO: 36 - DNA, 22 bp, Artificial Sequence
  Description of Artificial Sequence: Synthetic oligonucleotide
cataacctttccacataccgca

SEQ ID NO: 37 - DNA, 22 bp, Artificial Sequence
  Description of Artificial Sequence: Synthetic oligonucleotide
ataacctttccacataccgcag

SEQ ID NO: 38 - DNA, 22 bp, Artificial Sequence
  Description of Artificial Sequence: Synthetic oligonucleotide
gccataacctttccacataccg

SEQ ID NO: 39 - DNA, 22 bp, Artificial Sequence
  Description of Artificial Sequence: Synthetic oligonucleotide
ccataacctttccacataccgc

SEQ ID NO: 40 - DNA, 22 bp, Artificial Sequence
  Description of Artificial Sequence: Synthetic oligonucleotide
ccgtcaccaccacgaattcgtc

SEQ ID NO: 41 - DNA, 22 bp, Artificial Sequence
  Description of Artificial Sequence: Synthetic oligonucleotide
caaactgagttggacgtgtgtt

SEQ ID NO: 42 - DNA, 22 bp, Artificial Sequence
  Description of Artificial Sequence: Synthetic oligonucleotide
gcaaactgagttggacgtgtgt

SEQ ID NO: 43 - DNA, 22 bp, Artificial Sequence
  Description of Artificial Sequence: Synthetic oligonucleotide
aaactgagttggacgtgtgttt

SEQ ID NO: 44 - DNA, 22 bp, Artificial Sequence
  Description of Artificial Sequence: Synthetic oligonucleotide
ggcaaactgagttggacgtgtg

SEQ ID NO: 45 - DNA, 22 bp, Artificial Sequence
  Description of Artificial Sequence: Synthetic oligonucleotide
aggcaaactgagttggacgtgt

SEQ ID NO: 46 - DNA, 22 bp, Artificial Sequence
  Description of Artificial Sequence: Synthetic oligonucleotide
cgacaagttccgaggaacatgt

SEQ ID NO: 47 - DNA, 22 bp, Artificial Sequence
  Description of Artificial Sequence: Synthetic oligonucleotide
aagttccgaggaacatgtctgg

SEQ ID NO: 48 - DNA, 22 bp, Artificial Sequence
  Description of Artificial Sequence: Synthetic oligonucleotide
gacaagttccgaggaacatgtc

SEQ ID NO: 49 - DNA, 22 bp, Artificial Sequence
  Description of Artificial Sequence: Synthetic oligonucleotide
acaagttccgaggaacatgtct

SEQ ID NO: 50 - DNA, 22 bp, Artificial Sequence
  Description of Artificial Sequence: Synthetic oligonucleotide
aggatcataaactgtgttgttg

SEQ ID NO: 51 - DNA, 22 bp, Artificial Sequence
  Description of Artificial Sequence: Synthetic oligonucleotide
ggatcataaactgtgttgttga

SEQ ID NO: 52 - DNA, 22 bp, Artificial Sequence
  Description of Artificial Sequence: Synthetic oligonucleotide
gaaacctattactaggttccat

SEQ ID NO: 53 - DNA, 22 bp, Artificial Sequence
  Description of Artificial Sequence: Synthetic oligonucleotide
gagaattcattctgcacaagag

SEQ ID NO: 54 - DNA, 22 bp, Artificial Sequence
  Description of Artificial Sequence: Synthetic oligonucleotide
agaattcattctgcacaagagt

SEQ ID NO: 55 - DNA, 22 bp, Artificial Sequence
  Description of Artificial Sequence: Synthetic oligonucleotide
attcattctgcacaagagtaga

SEQ ID NO: 56 - DNA, 22 bp, Artificial Sequence
  Description of Artificial Sequence: Synthetic oligonucleotide
ttcattctgcacaagagtagac

SEQ ID NO: 57 - DNA, 22 bp, Artificial Sequence
  Description of Artificial Sequence: Synthetic oligonucleotide
gaattcattctgcacaagagta

SEQ ID NO: 58 - DNA, 22 bp, Artificial Sequence
  Description of Artificial Sequence: Synthetic oligonucleotide
aattcattctgcacaagagtag

SEQ ID NO: 59 - DNA, 22 bp, Artificial Sequence
  Description of Artificial Sequence: Synthetic oligonucleotide
attctgcacaagagtagactat

SEQ ID NO: 60 - DNA, 22 bp, Artificial Sequence
  Description of Artificial Sequence: Synthetic oligonucleotide
ttctgcacaagagtagactata

SEQ ID NO: 61 - DNA, 22 bp, Artificial Sequence
  Description of Artificial Sequence: Synthetic oligonucleotide
tcattctgcacaagagtagact

SEQ ID NO: 62 - DNA, 22 bp, Artificial Sequence
  Description of Artificial Sequence: Synthetic oligonucleotide
cattctgcacaagagtagacta

SEQ ID NO: 63 - DNA, 22 bp, Artificial Sequence
  Description of Artificial Sequence: Synthetic oligonucleotide
tcataaaggtctctatcagaca

SEQ ID NO: 64 - DNA, 22 bp, Artificial Sequence
  Description of Artificial Sequence: Synthetic oligonucleotide
gtcataaaggtctctatcagac

SEQ ID NO: 65 - DNA, 22 bp, Artificial Sequence
  Description of Artificial Sequence: Synthetic oligonucleotide
tgtcataaaggtctctatcaga

SEQ ID NO: 66 - DNA, 22 bp, Artificial Sequence
  Description of Artificial Sequence: Synthetic oligonucleotide
ttgtcataaaggtctctatcag

SEQ ID NO: 67 - DNA, 22 bp, Artificial Sequence
  Description of Artificial Sequence: Synthetic oligonucleotide
ttgaattggcaggcacttctgt

SEQ ID NO: 68 - DNA, 22 bp, Artificial Sequence
  Description of Artificial Sequence: Synthetic oligonucleotide
acagttgaattggcaggcactt

SEQ ID NO: 69 - DNA, 22 bp, Artificial Sequence
  Description of Artificial Sequence: Synthetic oligonucleotide
cagttgaattggcaggcacttc

SEQ ID NO: 70 - DNA, 22 bp, Artificial Sequence
  Description of Artificial Sequence: Synthetic oligonucleotide
agttgaattggcaggcacttct

SEQ ID NO: 71 - DNA, 22 bp, Artificial Sequence
  Description of Artificial Sequence: Synthetic oligonucleotide
ggccttgttgttgttggccttt

SEQ ID NO: 72 - DNA, 22 bp, Artificial Sequence
  Description of Artificial Sequence: Synthetic oligonucleotide
gccttgttgttgttggccttta

SEQ ID NO: 73 - DNA, 22 bp, Artificial Sequence
  Description of Artificial Sequence: Synthetic oligonucleotide
ccttgttgttgttggcctttac

SEQ ID NO: 74 - DNA, 22 bp, Artificial Sequence
  Description of Artificial Sequence: Synthetic oligonucleotide
cttgttgttgttggcctttacc

SEQ ID NO: 75 - DNA, 22 bp, Artificial Sequence
  Description of Artificial Sequence: Synthetic oligonucleotide
ttgttgttgttggcctttacca

SEQ ID NO: 76 - DNA, 22 bp, Artificial Sequence
  Description of Artificial Sequence: Synthetic oligonucleotide
tgttgttgttggcctttaccag

SEQ ID NO: 77 - DNA, 22 bp, Artificial Sequence
  Description of Artificial Sequence: Synthetic oligonucleotide
gttgttgttggcctttaccaga

SEQ ID NO: 78 - DNA, 22 bp, Artificial Sequence
  Description of Artificial Sequence: Synthetic oligonucleotide
ttgttgttggcctttaccagac

SEQ ID NO: 79 - DNA, 22 bp, Artificial Sequence
  Description of Artificial Sequence: Synthetic oligonucleotide
ttggccttgttgttgttggcct

SEQ ID NO: 80 - DNA, 22 bp, Artificial Sequence
  Description of Artificial Sequence: Synthetic oligonucleotide
tggccttgttgttgttggcctt

SEQ ID NO: 81 - DNA, 22 bp, Artificial Sequence
  Description of Artificial Sequence: Synthetic oligonucleotide
cgctctgaaaaacagcaagaag

SEQ ID NO: 82 - DNA, 22 bp, Artificial Sequence
  Description of Artificial Sequence: Synthetic oligonucleotide
gctctgaaaaacagcaagaagt

SEQ ID NO: 83 - DNA, 22 bp, Artificial Sequence
  Description of Artificial Sequence: Synthetic oligonucleotide
agcgctctgaaaaacagcaaga

SEQ ID NO: 84 - DNA, 22 bp, Artificial Sequence
  Description of Artificial Sequence: Synthetic oligonucleotide
gcgctctgaaaaacagcaagaa

SEQ ID NO: 85 - DNA, 22 bp, Artificial Sequence
  Description of Artificial Sequence: Synthetic oligonucleotide
ctgaaaaacagcaagaagtgca

SEQ ID NO: 86 - DNA, 22 bp, Artificial Sequence
  Description of Artificial Sequence: Synthetic oligonucleotide
tgaaaaacagcaagaagtgcaa

SEQ ID NO: 87 - DNA, 22 bp, Artificial Sequence
  Description of Artificial Sequence: Synthetic oligonucleotide
ctctgaaaaacagcaagaagtg

SEQ ID NO: 88 - DNA, 22 bp, Artificial Sequence
  Description of Artificial Sequence: Synthetic oligonucleotide
tctgaaaaacagcaagaagtgc

SEQ ID NO: 89 - DNA, 22 bp, Artificial Sequence
  Description of Artificial Sequence: Synthetic oligonucleotide
gaagcgctctgaaaaacagcaa

SEQ ID NO: 90 - DNA, 22 bp, Artificial Sequence
  Description of Artificial Sequence: Synthetic oligonucleotide
aagcgctctgaaaaacagcaag

SEQ ID NO: 91 - DNA, 22 bp, Artificial Sequence
  Description of Artificial Sequence: Synthetic oligonucleotide
ggttctcatagagaacattctg

SEQ ID NO: 92 - DNA, 22 bp, Artificial Sequence
  Description of Artificial Sequence: Synthetic oligonucleotide
tggttctcatagagaacattct

SEQ ID NO: 93 - DNA, 22 bp, Artificial Sequence
  Description of Artificial Sequence: Synthetic oligonucleotide
gttcgcggagttgatcacaact

SEQ ID NO: 94 - DNA, 22 bp, Artificial Sequence
  Description of Artificial Sequence: Synthetic oligonucleotide
ggttcgcggagttgatcacaac

SEQ ID NO: 95 - DNA, 22 bp, Artificial Sequence
  Description of Artificial Sequence: Synthetic oligonucleotide
tcgcggagttgatcacaactac

SEQ ID NO: 96 - DNA, 22 bp, Artificial Sequence
  Description of Artificial Sequence: Synthetic oligonucleotide
ttcgcggagttgatcacaacta

SEQ ID NO: 97 - DNA, 22 bp, Artificial Sequence
  Description of Artificial Sequence: Synthetic oligonucleotide
gggttcgcggagttgatcacaa

SEQ ID NO: 98 - DNA, 22 bp, Artificial Sequence
  Description of Artificial Sequence: Synthetic oligonucleotide
catacaaactgccaccatcaca

SEQ ID NO: 99 - DNA, 22 bp, Artificial Sequence
  Description of Artificial Sequence: Synthetic oligonucleotide
acatacaaactgccaccatcac

SEQ ID NO: 100 - DNA, 22 bp, Artificial Sequence
  Description of Artificial Sequence: Synthetic oligonucleotide
aggatgaaatggtgaattgccc

SEQ ID NO: 101 - DNA, 22 bp, Artificial Sequence
  Description of Artificial Sequence: Synthetic oligonucleotide
gaggatgaaatggtgaattgcc

SEQ ID NO: 102 - DNA, 22 bp, Artificial Sequence
  Description of Artificial Sequence: Synthetic oligonucleotide
gatgaaatggtgaattgccctc

SEQ ID NO: 103 - DNA, 22 bp, Artificial Sequence
  Description of Artificial Sequence: Synthetic oligonucleotide
ggatgaaatggtgaattgccct

SEQ ID NO: 104 - DNA, 22 bp, Artificial Sequence
  Description of Artificial Sequence: Synthetic oligonucleotide
agaggatgaaatggtgaattgc

SEQ ID NO: 105 - DNA, 22 bp, Artificial Sequence
  Description of Artificial Sequence: Synthetic oligonucleotide
gtcctttagtaaggtcagtctc

SEQ ID NO: 106 - DNA, 22 bp, Artificial Sequence
  Description of Artificial Sequence: Synthetic oligonucleotide
tagtaaggtcagtctcagtcca

SEQ ID NO: 107 - DNA, 22 bp, Artificial Sequence
  Description of Artificial Sequence: Synthetic oligonucleotide
agtaaggtcagtctcagtccaa

SEQ ID NO: 108 - DNA, 22 bp, Artificial Sequence
  Description of Artificial Sequence: Synthetic oligonucleotide
gtaaggtcagtctcagtccaac

SEQ ID NO: 109 - DNA, 22 bp, Artificial Sequence
  Description of Artificial Sequence: Synthetic oligonucleotide
taaggtcagtctcagtccaaca

SEQ ID NO: 110 - DNA, 22 bp, Artificial Sequence
  Description of Artificial Sequence: Synthetic oligonucleotide
cctttagtaaggtcagtctcag

SEQ ID NO: 111 - DNA, 22 bp, Artificial Sequence
  Description of Artificial Sequence: Synthetic oligonucleotide
ctttagtaaggtcagtctcagt

SEQ ID NO: 112 - DNA, 22 bp, Artificial Sequence
  Description of Artificial Sequence: Synthetic oligonucleotide
tttagtaaggtcagtctcagtc

SEQ ID NO: 113 - DNA, 22 bp, Artificial Sequence
  Description of Artificial Sequence: Synthetic oligonucleotide
taagaaagcgttcgtgatgtag

SEQ ID NO: 114 - DNA, 22 bp, Artificial Sequence
  Description of Artificial Sequence: Synthetic oligonucleotide
ataagaaagcgttcgtgatgta

SEQ ID NO: 115 - DNA, 22 bp, Artificial Sequence
  Description of Artificial Sequence: Synthetic oligonucleotide
aaagcgttcgtgatgtagcaac

SEQ ID NO: 116 - DNA, 22 bp, Artificial Sequence
  Description of Artificial Sequence: Synthetic oligonucleotide
gaaagcgttcgtgatgtagcaa

SEQ ID NO: 117 - DNA, 22 bp, Artificial Sequence
  Description of Artificial Sequence: Synthetic oligonucleotide
agaaagcgttcgtgatgtagca

SEQ ID NO: 118 - DNA, 22 bp, Artificial Sequence
  Description of Artificial Sequence: Synthetic oligonucleotide
aagaaagcgttcgtgatgtagc

SEQ ID NO: 119 - DNA, 22 bp, Artificial Sequence
  Description of Artificial Sequence: Synthetic oligonucleotide
cgttcgtgatgtagcaacagtg

SEQ ID NO: 120 - DNA, 22 bp, Artificial Sequence
  Description of Artificial Sequence: Synthetic oligonucleotide
gcgttcgtgatgtagcaacagt

SEQ ID NO: 121 - DNA, 22 bp, Artificial Sequence
  Description of Artificial Sequence: Synthetic oligonucleotide
agcgttcgtgatgtagcaacag

SEQ ID NO: 122 - DNA, 22 bp, Artificial Sequence
  Description of Artificial Sequence: Synthetic oligonucleotide
aagcgttcgtgatgtagcaaca

SEQ ID NO: 123 - DNA, 22 bp, Artificial Sequence
  Description of Artificial Sequence: Synthetic oligonucleotide
gcgcagtaaggatggctagtgt

SEQ ID NO: 124 - DNA, 22 bp, Artificial Sequence
  Description of Artificial Sequence: Synthetic oligonucleotide
cgcagtaaggatggctagtgta

SEQ ID NO: 125 - DNA, 22 bp, Artificial Sequence
  Description of Artificial Sequence: Synthetic oligonucleotide
agtaaggatggctagtgtaact

SEQ ID NO: 126 - DNA, 22 bp, Artificial Sequence
  Description of Artificial Sequence: Synthetic oligonucleotide
gtaaggatggctagtgtaacta

SEQ ID NO: 127 - DNA, 22 bp, Artificial Sequence
  Description of Artificial Sequence: Synthetic oligonucleotide
gcagtaaggatggctagtgtaa

SEQ ID NO: 128 - DNA, 22 bp, Artificial Sequence
  Description of Artificial Sequence: Synthetic oligonucleotide
cagtaaggatggctagtgtaac

SEQ ID NO: 129 - DNA, 22 bp, Artificial Sequence
  Description of Artificial Sequence: Synthetic oligonucleotide
aggatggctagtgtaactagca

SEQ ID NO: 130 - DNA, 22 bp, Artificial Sequence
  Description of Artificial Sequence: Synthetic oligonucleotide
ggatggctagtgtaactagcaa

SEQ ID NO: 131 - DNA, 22 bp, Artificial Sequence
  Description of Artificial Sequence: Synthetic oligonucleotide
taaggatggctagtgtaactag

SEQ ID NO: 132 - DNA, 22 bp, Artificial Sequence
  Description of Artificial Sequence: Synthetic oligonucleotide
aaggatggctagtgtaactagc

SEQ ID NO: 133 - DNA, 22 bp, Artificial Sequence
  Description of Artificial Sequence: Synthetic oligonucleotide
tgtcctcagatctagcctgttt

SEQ ID NO: 134 - DNA, 22 bp, Artificial Sequence
  Description of Artificial Sequence: Synthetic oligonucleotide
ttgtcctcagatctagcctgtt

SEQ ID NO: 135 - DNA, 22 bp, Artificial Sequence
  Description of Artificial Sequence: Synthetic oligonucleotide
tgacgtgatatatgtggtacca

SEQ ID NO: 136 - DNA, 22 bp, Artificial Sequence
  Description of Artificial Sequence: Synthetic oligonucleotide
gacgtgatatatgtggtaccat

SEQ ID NO: 137 - DNA, 22 bp, Artificial Sequence
  Description of Artificial Sequence: Synthetic oligonucleotide
acgtgatatatgtggtaccatg

SEQ ID NO: 138 - DNA, 22 bp, Artificial Sequence
  Description of Artificial Sequence: Synthetic oligonucleotide
cgtgatatatgtggtaccatgt

SEQ ID NO: 139 - DNA, 22 bp, Artificial Sequence
  Description of Artificial Sequence: Synthetic oligonucleotide
acgttgacgtgatatatgtggt

SEQ ID NO: 140 - DNA, 22 bp, Artificial Sequence
  Description of Artificial Sequence: Synthetic oligonucleotide
cgttgacgtgatatatgtggta

SEQ ID NO: 141 - DNA, 22 bp, Artificial Sequence
  Description of Artificial Sequence: Synthetic oligonucleotide
gttgacgtgatatatgtggtac

SEQ ID NO: 142 - DNA, 22 bp, Artificial Sequence
  Description of Artificial Sequence: Synthetic oligonucleotide
ttgacgtgatatatgtggtacc

SEQ ID NO: 143 - DNA, 22 bp, Artificial Sequence
  Description of Artificial Sequence: Synthetic oligonucleotide
agacgttgacgtgatatatgtg

SEQ ID NO: 144 - DNA, 22 bp, Artificial Sequence
  Description of Artificial Sequence: Synthetic oligonucleotide
gacgttgacgtgatatatgtgg

SEQ ID NO: 145 - DNA, 22 bp, Artificial Sequence
  Description of Artificial Sequence: Synthetic oligonucleotide
gtaagtgcagctactgaaaagc

SEQ ID NO: 146 - DNA, 22 bp, Artificial Sequence
  Description of Artificial Sequence: Synthetic oligonucleotide
taagtgcagctactgaaaagca

SEQ ID NO: 147 - DNA, 22 bp, Artificial Sequence
  Description of Artificial Sequence: Synthetic oligonucleotide
tagaagttcaaaagaaagtact

SEQ ID NO: 148 - DNA, 22 bp, Artificial Sequence
  Description of Artificial Sequence: Synthetic oligonucleotide
tctacaccacagaaaactcctg

SEQ ID NO: 149 - DNA, 22 bp, Artificial Sequence
  Description of Artificial Sequence: Synthetic oligonucleotide
atctacaccacagaaaactcct

SEQ ID NO: 150 - DNA, 22 bp, Artificial Sequence
  Description of Artificial Sequence: Synthetic oligonucleotide
catctacaccacagaaaactcc

SEQ ID NO: 151 - DNA, 22 bp, Artificial Sequence
  Description of Artificial Sequence: Synthetic oligonucleotide
gcatctacaccacagaaaactc

SEQ ID NO: 152 - DNA, 22 bp, Artificial Sequence
  Description of Artificial Sequence: Synthetic oligonucleotide
cacacatatctaaaacggcaat

SEQ ID NO: 153 - DNA, 22 bp, Artificial Sequence
  Description of Artificial Sequence: Synthetic oligonucleotide
acacatatctaaaacggcaatt

SEQ ID NO: 154 - DNA, 22 bp, Artificial Sequence
  Description of Artificial Sequence: Synthetic oligonucleotide
agcacacatatctaaaacggca

SEQ ID NO: 155 - DNA, 22 bp, Artificial Sequence
  Description of Artificial Sequence: Synthetic oligonucleotide
tggaagcgacaacaattagttt

SEQ ID NO: 156 - DNA, 22 bp, Artificial Sequence
  Description of Artificial Sequence: Synthetic oligonucleotide
cacatatctaaaacggcaattc

SEQ ID NO: 157 - DNA, 22 bp, Artificial Sequence
  Description of Artificial Sequence: Synthetic oligonucleotide
tttaggtgtgtctgtaacaaac

SEQ ID NO: 158 - DNA, 22 bp, Artificial Sequence
  Description of Artificial Sequence: Synthetic oligonucleotide
ctttaggtgtgtctgtaacaaa

SEQ ID NO: 159 - DNA, 22 bp, Artificial Sequence
  Description of Artificial Sequence: Synthetic oligonucleotide
taggtgtgtctgtaacaaacct

SEQ ID NO: 160 - DNA, 22 bp, Artificial Sequence
  Description of Artificial Sequence: Synthetic oligonucleotide
ttaggtgtgtctgtaacaaacc

SEQ ID NO: 161 - DNA, 22 bp, Artificial Sequence
  Description of Artificial Sequence: Synthetic oligonucleotide
cctttaggtgtgtctgtaacaa

SEQ ID NO: 162 - DNA, 22 bp, Artificial Sequence
  Description of Artificial Sequence: Synthetic oligonucleotide
cagaggttataagtatcaaatt

SEQ ID NO: 163 - DNA, 22 bp, Artificial Sequence
  Description of Artificial Sequence: Synthetic oligonucleotide
ccagaggttataagtatcaaat

SEQ ID NO: 164 - DNA, 22 bp, Artificial Sequence
  Description of Artificial Sequence: Synthetic oligonucleotide
tccagaggttataagtatcaaa

SEQ ID NO: 165 - DNA, 22 bp, Artificial Sequence
  Description of Artificial Sequence: Synthetic oligonucleotide
ttccagaggttataagtatcaa

SEQ ID NO: 166 - DNA, 22 bp, Artificial Sequence
  Description of Artificial Sequence: Synthetic oligonucleotide
ggttataagtatcaaattgttt

SEQ ID NO: 167 - DNA, 22 bp, Artificial Sequence
  Description of Artificial Sequence: Synthetic oligonucleotide
aggttataagtatcaaattgtt

SEQ ID NO: 168 - DNA, 22 bp, Artificial Sequence
  Description of Artificial Sequence: Synthetic oligonucleotide
gaggttataagtatcaaattgt

SEQ ID NO: 169 - DNA, 22 bp, Artificial Sequence
  Description of Artificial Sequence: Synthetic oligonucleotide
agaggttataagtatcaaattg

SEQ ID NO: 170 - DNA, 22 bp, Artificial Sequence
  Description of Artificial Sequence: Synthetic oligonucleotide
gtcatagtactacagatagaga

SEQ ID NO: 171 - DNA, 22 bp, Artificial Sequence
  Description of Artificial Sequence: Synthetic oligonucleotide
tcatagtactacagatagagac

SEQ ID NO: 172 - DNA, 22 bp, Artificial Sequence
  Description of Artificial Sequence: Synthetic oligonucleotide
gtactacagatagagacaccag

SEQ ID NO: 173 - DNA, 22 bp, Artificial Sequence
  Description of Artificial Sequence: Synthetic oligonucleotide
tactacagatagagacaccagc

SEQ ID NO: 174 - DNA, 22 bp, Artificial Sequence
  Description of Artificial Sequence: Synthetic oligonucleotide
actacagatagagacaccagct

SEQ ID NO: 175 - DNA, 22 bp, Artificial Sequence
  Description of Artificial Sequence: Synthetic oligonucleotide
ctacagatagagacaccagcta

SEQ ID NO: 176 - DNA, 22 bp, Artificial Sequence
  Description of Artificial Sequence: Synthetic oligonucleotide
catagtactacagatagagaca

SEQ ID NO: 177 - DNA, 22 bp, Artificial Sequence
  Description of Artificial Sequence: Synthetic oligonucleotide
atagtactacagatagagacac

SEQ ID NO: 178 - DNA, 22 bp, Artificial Sequence
  Description of Artificial Sequence: Synthetic oligonucleotide
tagtactacagatagagacacc

SEQ ID NO: 179 - DNA, 22 bp, Artificial Sequence
  Description of Artificial Sequence: Synthetic oligonucleotide
agtactacagatagagacacca

SEQ ID NO: 180 - DNA, 22 bp, Artificial Sequence
  Description of Artificial Sequence: Synthetic oligonucleotide
gcacgctagtagtcgtcgtcgg

SEQ ID NO: 181 - DNA, 22 bp, Artificial Sequence
  Description of Artificial Sequence: Synthetic oligonucleotide
ggcacgctagtagtcgtcgtcg

SEQ ID NO: 182 - DNA, 22 bp, Artificial Sequence
  Description of Artificial Sequence: Synthetic oligonucleotide
gtagtcgtcgtcggttcatcat

SEQ ID NO: 183 - DNA, 22 bp, Artificial Sequence
  Description of Artificial Sequence: Synthetic oligonucleotide
agtagtcgtcgtcggttcatca

SEQ ID NO: 184 - DNA, 22 bp, Artificial Sequence
  Description of Artificial Sequence: Synthetic oligonucleotide
tagtagtcgtcgtcggttcatc

SEQ ID NO: 185 - DNA, 22 bp, Artificial Sequence
  Description of Artificial Sequence: Synthetic oligonucleotide
ctagtagtcgtcgtcggttcat

SEQ ID NO: 186 - DNA, 22 bp, Artificial Sequence
  Description of Artificial Sequence: Synthetic oligonucleotide
gctagtagtcgtcgtcggttca

SEQ ID NO: 187 - DNA, 22 bp, Artificial Sequence
  Description of Artificial Sequence: Synthetic oligonucleotide
cgctagtagtcgtcgtcggttc

SEQ ID NO: 188 - DNA, 22 bp, Artificial Sequence
  Description of Artificial Sequence: Synthetic oligonucleotide
acgctagtagtcgtcgtcggtt

SEQ ID NO: 189 - DNA, 22 bp, Artificial Sequence
  Description of Artificial Sequence: Synthetic oligonucleotide
cacgctagtagtcgtcgtcggt

SEQ ID NO: 190 - DNA, 22 bp, Artificial Sequence
  Description of Artificial Sequence: Synthetic oligonucleotide
tattgaaataatcatcatcaca

SEQ ID NO: 191 - DNA, 22 bp, Artificial Sequence
  Description of Artificial Sequence: Synthetic oligonucleotide
aaataatcatcatcacaacaat

SEQ ID NO: 192 - DNA, 22 bp, Artificial Sequence
  Description of Artificial Sequence: Synthetic oligonucleotide
gaaataatcatcatcacaacaa

SEQ ID NO: 193 - DNA, 22 bp, Artificial Sequence
  Description of Artificial Sequence: Synthetic oligonucleotide
tgaaataatcatcatcacaaca

SEQ ID NO: 194 - DNA, 22 bp, Artificial Sequence
  Description of Artificial Sequence: Synthetic oligonucleotide
aatcatcatcacaacaattgta

SEQ ID NO: 195 - DNA, 22 bp, Artificial Sequence
  Description of Artificial Sequence: Synthetic oligonucleotide
taatcatcatcacaacaattgt

SEQ ID NO: 196 - DNA, 22 bp, Artificial Sequence
  Description of Artificial Sequence: Synthetic oligonucleotide
ataatcatcatcacaacaattg

SEQ ID NO: 197 - DNA, 22 bp, Artificial Sequence
  Description of Artificial Sequence: Synthetic oligonucleotide
aataatcatcatcacaacaatt

SEQ ID NO: 198 - DNA, 22 bp, Artificial Sequence
  Description of Artificial Sequence: Synthetic oligonucleotide
ctgatatcacacattgttggta

SEQ ID NO: 199 - DNA, 22 bp, Artificial Sequence
  Description of Artificial Sequence: Synthetic oligonucleotide
tctgatatcacacattgttggt

SEQ ID NO: 200 - DNA, 22 bp, Artificial Sequence
  Description of Artificial Sequence: Synthetic oligonucleotide
tcacacattgttggtagattat

SEQ ID NO: 201 - DNA, 22 bp, Artificial Sequence
  Description of Artificial Sequence: Synthetic oligonucleotide
atcacacattgttggtagatta

SEQ ID NO: 202 - DNA, 22 bp, Artificial Sequence
  Description of Artificial Sequence: Synthetic oligonucleotide
acacattgttggtagattataa

SEQ ID NO: 203 - DNA, 22 bp, Artificial Sequence
  Description of Artificial Sequence: Synthetic oligonucleotide
cacacattgttggtagattata

SEQ ID NO: 204 - DNA, 22 bp, Artificial Sequence
  Description of Artificial Sequence: Synthetic oligonucleotide
gatatcacacattgttggtaga

SEQ ID NO: 205 - DNA, 22 bp, Artificial Sequence
  Description of Artificial Sequence: Synthetic oligonucleotide
tgatatcacacattgttggtag

SEQ ID NO: 206 - DNA, 22 bp, Artificial Sequence
  Description of Artificial Sequence: Synthetic oligonucleotide
tatcacacattgttggtagatt

SEQ ID NO: 207 - DNA, 22 bp, Artificial Sequence
  Description of Artificial Sequence: Synthetic oligonucleotide
atatcacacattgttggtagat

SEQ ID NO: 208 - DNA, 22 bp, Artificial Sequence
  Description of Artificial Sequence: Synthetic oligonucleotide
accagctacggtgcgagctcta

SEQ ID NO: 209 - DNA, 22 bp, Artificial Sequence
  Description of Artificial Sequence: Synthetic oligonucleotide
caccagctacggtgcgagctct

SEQ ID NO: 210 - DNA, 22 bp, Artificial Sequence
  Description of Artificial Sequence: Synthetic oligonucleotide
cagctacggtgcgagctctatt

SEQ ID NO: 211 - DNA, 22 bp, Artificial Sequence
  Description of Artificial Sequence: Synthetic oligonucleotide
ccagctacggtgcgagctctat

SEQ ID NO: 212 - DNA, 22 bp, Artificial Sequence
  Description of Artificial Sequence: Synthetic oligonucleotide
gctacggtgcgagctctattct

SEQ ID NO: 213 - DNA, 22 bp, Artificial Sequence
  Description of Artificial Sequence: Synthetic oligonucleotide
agctacggtgcgagctctattc

SEQ ID NO: 214 - DNA, 22 bp, Artificial Sequence
  Description of Artificial Sequence: Synthetic oligonucleotide
tacggtgcgagctctattcttt

SEQ ID NO: 215 - DNA, 22 bp, Artificial Sequence
  Description of Artificial Sequence: Synthetic oligonucleotide
ctacggtgcgagctctattctt

SEQ ID NO: 216 - DNA, 22 bp, Artificial Sequence
  Description of Artificial Sequence: Synthetic oligonucleotide
acaccagctacggtgcgagctc

SEQ ID NO: 217 - DNA, 22 bp, Artificial Sequence
  Description of Artificial Sequence: Synthetic oligonucleotide
gacaccagctacggtgcgagct

SEQ ID NO: 218 - DNA, 22 bp, Artificial Sequence
  Description of Artificial Sequence: Synthetic oligonucleotide
gaacctgtttgcgcatctgtta

SEQ ID NO: 219 - DNA, 22 bp, Artificial Sequence
  Description of Artificial Sequence: Synthetic oligonucleotide
tgaacctgtttgcgcatctgtt

SEQ ID NO: 220 - DNA, 22 bp, Artificial Sequence
  Description of Artificial Sequence: Synthetic oligonucleotide
acctgtttgcgcatctgttatg

SEQ ID NO: 221 - DNA, 22 bp, Artificial Sequence
  Description of Artificial Sequence: Synthetic oligonucleotide
agatgaacctgtttgcgcatct

SEQ ID NO: 222 - DNA, 22 bp, Artificial Sequence
  Description of Artificial Sequence: Synthetic oligonucleotide
tagatgaacctgtttgcgcatc

SEQ ID NO: 223 - DNA, 22 bp, Artificial Sequence
  Description of Artificial Sequence: Synthetic oligonucleotide
atgaacctgtttgcgcatctgt

SEQ ID NO: 224 - DNA, 22 bp, Artificial Sequence
  Description of Artificial Sequence: Synthetic oligonucleotide
gatgaacctgtttgcgcatctg

SEQ ID NO: 225 - DNA, 22 bp, Artificial Sequence
  Description of Artificial Sequence: Synthetic oligonucleotide
aacatgtctggacctatagttt

SEQ ID NO: 226 - DNA, 22 bp, Artificial Sequence
  Description of Artificial Sequence: Synthetic oligonucleotide
tttcataagtctacacactgaa

SEQ ID NO: 227 - DNA, 22 bp, Artificial Sequence
  Description of Artificial Sequence: Synthetic oligonucleotide
ttcataagtctacacactgaat

SEQ ID NO: 228 - DNA, 22 bp, Artificial Sequence
  Description of Artificial Sequence: Synthetic oligonucleotide
caaaacttgtaggtgggaacac

SEQ ID NO: 229 - DNA, 22 bp, Artificial Sequence
  Description of Artificial Sequence: Synthetic oligonucleotide
gtccaaaacttgtaggtgggaa

SEQ ID NO: 230 - DNA, 22 bp, Artificial Sequence
  Description of Artificial Sequence: Synthetic oligonucleotide
tccaaaacttgtaggtgggaac

SEQ ID NO: 231 - DNA, 22 bp, Artificial Sequence
  Description of Artificial Sequence: Synthetic oligonucleotide
tcattaggtttcttaatagtaa

SEQ ID NO: 232 - DNA, 22 bp, Artificial Sequence
  Description of Artificial Sequence: Synthetic oligonucleotide
attgcagcagtacgcacacaat

SEQ ID NO: 233 - DNA, 22 bp, Artificial Sequence
  Description of Artificial Sequence: Synthetic oligonucleotide
aaaaactataacattaataggc

SEQ ID NO: 234 - DNA, 22 bp, Artificial Sequence
  Description of Artificial Sequence: Synthetic oligonucleotide
caaaaactataacattaatagg

SEQ ID NO: 235 - DNA, 22 bp, Artificial Sequence
  Description of Artificial Sequence: Synthetic oligonucleotide
tcaaaaactataacattaatag

SEQ ID NO: 236 - DNA, 22 bp, Artificial Sequence
  Description of Artificial Sequence: Synthetic oligonucleotide
atcaaaaactataacattaata

SEQ ID NO: 237 - DNA, 22 bp, Artificial Sequence
  Description of Artificial Sequence: Synthetic oligonucleotide
aaaactataacattaataggca

SEQ ID NO: 238 - DNA, 22 bp, Artificial Sequence
  Description of Artificial Sequence: Synthetic oligonucleotide
catcaaaaactataacattaat

SEQ ID NO: 239 - DNA, 22 bp, Artificial Sequence
  Description of Artificial Sequence: Synthetic oligonucleotide
ccatcaaaaactataacattaa

SEQ ID NO: 240 - DNA, 22 bp, Artificial Sequence
  Description of Artificial Sequence: Synthetic oligonucleotide
acctttccacataccgcagacg

SEQ ID NO: 241 - DNA, 22 bp, Artificial Sequence
  Description of Artificial Sequence: Synthetic oligonucleotide
taacctttccacataccgcaga

SEQ ID NO: 242 - DNA, 22 bp, Artificial Sequence
  Description of Artificial Sequence: Synthetic oligonucleotide
atcatcattgagaaatgtttac

SEQ ID NO: 243 - DNA, 22 bp, Artificial Sequence
  Description of Artificial Sequence: Synthetic oligonucleotide
catcattgagaaatgtttacgc

SEQ ID NO: 244 - DNA, 22 bp, Artificial Sequence
  Description of Artificial Sequence: Synthetic oligonucleotide
tcatcattgagaaatgtttacg

SEQ ID NO: 245 - DNA, 22 bp, Artificial Sequence
  Description of Artificial Sequence: Synthetic oligonucleotide
tcagaaccagcaccaaaatgta

SEQ ID NO: 246 - DNA, 22 bp, Artificial Sequence
  Description of Artificial Sequence: Synthetic oligonucleotide
aaccagcaccaaaatgtataac

SEQ ID NO: 247 - DNA, 22 bp, Artificial Sequence
  Description of Artificial Sequence: Synthetic oligonucleotide
actgctgcctggagttgaattt

SEQ ID NO: 248 - DNA, 22 bp, Artificial Sequence
  Description of Artificial Sequence: Synthetic oligonucleotide
tactgctgcctggagttgaatt

SEQ ID NO: 249 - DNA, 22 bp, Artificial Sequence
  Description of Artificial Sequence: Synthetic oligonucleotide
tgctgcctggagttgaatttct

SEQ ID NO: 250 - DNA, 22 bp, Artificial Sequence
  Description of Artificial Sequence: Synthetic oligonucleotide
ctgctgcctggagttgaatttc

SEQ ID NO: 251 - DNA, 22 bp, Artificial Sequence
  Description of Artificial Sequence: Synthetic oligonucleotide
ccctactgctgcctggagttga

SEQ ID NO: 252 - DNA, 22 bp, Artificial Sequence
  Description of Artificial Sequence: Synthetic oligonucleotide
cccctactgctgcctggagttg

SEQ ID NO: 253 - DNA, 22 bp, Artificial Sequence
  Description of Artificial Sequence: Synthetic oligonucleotide
gaacagatctacaagagatcga

SEQ ID NO: 254 - DNA, 22 bp, Artificial Sequence
  Description of Artificial Sequence: Synthetic oligonucleotide
agaacagatctacaagagatcg

SEQ ID NO: 255 - DNA, 22 bp, Artificial Sequence
  Description of Artificial Sequence: Synthetic oligonucleotide
gagaacagatctacaagagatc

SEQ ID NO: 256 - DNA, 22 bp, Artificial Sequence
  Description of Artificial Sequence: Synthetic oligonucleotide
agagaacagatctacaagagat

SEQ ID NO: 257 - DNA, 22 bp, Artificial Sequence
  Description of Artificial Sequence: Synthetic oligonucleotide
tagagaacagatctacaagaga

SEQ ID NO: 258 - DNA, 22 bp, Artificial Sequence
  Description of Artificial Sequence: Synthetic oligonucleotide
ttagagaacagatctacaagag

SEQ ID NO: 259 - DNA, 22 bp, Artificial Sequence
  Description of Artificial Sequence: Synthetic oligonucleotide
tttagagaacagatctacaaga

SEQ ID NO: 260 - DNA, 22 bp, Artificial Sequence
  Description of Artificial Sequence: Synthetic oligonucleotide
gtttagagaacagatctacaag

SEQ ID NO: 261 - DNA, 22 bp, Artificial Sequence
  Description of Artificial Sequence: Synthetic oligonucleotide
cgtttagagaacagatctacaa

SEQ ID NO: 262 - DNA, 22 bp, Artificial Sequence
  Description of Artificial Sequence: Synthetic oligonucleotide
tcgtttagagaacagatctaca

SEQ ID NO: 263 - DNA, 22 bp, Artificial Sequence
  Description of Artificial Sequence: Synthetic oligonucleotide
attctcttaccacgcctatttg

SEQ ID NO: 264 - DNA, 22 bp, Artificial Sequence
  Description of Artificial Sequence: Synthetic oligonucleotide
aattctcttaccacgcctattt

SEQ ID NO: 265 - DNA, 22 bp, Artificial Sequence
  Description of Artificial Sequence: Synthetic oligonucleotide
atttataattataatcagcaat

SEQ ID NO: 266 - DNA, 22 bp, Artificial Sequence
  Description of Artificial Sequence: Synthetic oligonucleotide
tttataattataatcagcaatc

SEQ ID NO: 267 - DNA, 22 bp, Artificial Sequence
  Description of Artificial Sequence: Synthetic oligonucleotide
gcaattccagtttgagcagaaa

SEQ ID NO: 268 - DNA, 22 bp, Artificial Sequence
  Description of Artificial Sequence: Synthetic oligonucleotide
ggcaattccagtttgagcagaa

SEQ ID NO: 269 - DNA, 22 bp, Artificial Sequence
  Description of Artificial Sequence: Synthetic oligonucleotide
ccagtttgagcagaaagaggtc

SEQ ID NO: 270 - DNA, 22 bp, Artificial Sequence
  Description of Artificial Sequence: Synthetic oligonucleotide
tccagtttgagcagaaagaggt

SEQ ID NO: 271 - DNA, 22 bp, Artificial Sequence
  Description of Artificial Sequence: Synthetic oligonucleotide
cagtttgagcagaaagaggtcc

SEQ ID NO: 272 - DNA, 22 bp, Artificial Sequence
  Description of Artificial Sequence: Synthetic oligonucleotide
aattccagtttgagcagaaaga

SEQ ID NO: 273 - DNA, 22 bp, Artificial Sequence
  Description of Artificial Sequence: Synthetic oligonucleotide
caattccagtttgagcagaaag

SEQ ID NO: 274 - DNA, 22 bp, Artificial Sequence
  Description of Artificial Sequence: Synthetic oligonucleotide
ttccagtttgagcagaaagagg

SEQ ID NO: 275 - DNA, 22 bp, Artificial Sequence
  Description of Artificial Sequence: Synthetic oligonucleotide
attccagtttgagcagaaagag

SEQ ID NO: 276 - DNA, 22 bp, Artificial Sequence
  Description of Artificial Sequence: Synthetic oligonucleotide
gtgcctgtgccgcacggtgtaa

SEQ ID NO: 277 - DNA, 22 bp, Artificial Sequence
  Description of Artificial Sequence: Synthetic oligonucleotide
tgcctgtgccgcacggtgtaag

SEQ ID NO: 278 - DNA, 22 bp, Artificial Sequence
  Description of Artificial Sequence: Synthetic oligonucleotide
ctgtgccgcacggtgtaagacg

SEQ ID NO: 279 - DNA, 22 bp, Artificial Sequence
  Description of Artificial Sequence: Synthetic oligonucleotide
tgtgccgcacggtgtaagacgg

SEQ ID NO: 280 - DNA, 22 bp, Artificial Sequence
  Description of Artificial Sequence: Synthetic oligonucleotide
gcctgtgccgcacggtgtaaga

SEQ ID NO: 281 - DNA, 22 bp, Artificial Sequence
  Description of Artificial Sequence: Synthetic oligonucleotide
cctgtgccgcacggtgtaagac

SEQ ID NO: 282 - DNA, 22 bp, Artificial Sequence
  Description of Artificial Sequence: Synthetic oligonucleotide
gccgcacggtgtaagacgggct

SEQ ID NO: 283 - DNA, 22 bp, Artificial Sequence
  Description of Artificial Sequence: Synthetic oligonucleotide
ccgcacggtgtaagacgggctg

SEQ ID NO: 284 - DNA, 22 bp, Artificial Sequence
  Description of Artificial Sequence: Synthetic oligonucleotide
gtgccgcacggtgtaagacggg

SEQ ID NO: 285 - DNA, 22 bp, Artificial Sequence
  Description of Artificial Sequence: Synthetic oligonucleotide
tgccgcacggtgtaagacgggc

SEQ ID NO: 286 - DNA, 22 bp, Artificial Sequence
  Description of Artificial Sequence: Synthetic oligonucleotide
aaagctcaaatgctacattaac

SEQ ID NO: 287 - DNA, 22 bp, Artificial Sequence
  Description of Artificial Sequence: Synthetic oligonucleotide
caaagctcaaatgctacattaa

SEQ ID NO: 288 - DNA, 22 bp, Artificial Sequence
  Description of Artificial Sequence: Synthetic oligonucleotide
agctcaaatgctacattaacag

SEQ ID NO: 289 - DNA, 22 bp, Artificial Sequence
  Description of Artificial Sequence: Synthetic oligonucleotide
aagctcaaatgctacattaaca

SEQ ID NO: 290 - DNA, 22 bp, Artificial Sequence
  Description of Artificial Sequence: Synthetic oligonucleotide
gctcaaatgctacattaacagg

SEQ ID NO: 291 - DNA, 22 bp, Artificial Sequence
  Description of Artificial Sequence: Synthetic oligonucleotide
gcaacattgctagaaaactcat

SEQ ID NO: 292 - DNA, 22 bp, Artificial Sequence
  Description of Artificial Sequence: Synthetic oligonucleotide
tgcaacattgctagaaaactca

SEQ ID NO: 293 - DNA, 22 bp, Artificial Sequence
  Description of Artificial Sequence: Synthetic oligonucleotide
aacattgctagaaaactcatct

SEQ ID NO: 294 - DNA, 22 bp, Artificial Sequence
  Description of Artificial Sequence: Synthetic oligonucleotide
caacattgctagaaaactcatc

SEQ ID NO: 295 - DNA, 22 bp, Artificial Sequence
  Description of Artificial Sequence: Synthetic oligonucleotide
cattgctagaaaactcatctga

SEQ ID NO: 296 - DNA, 22 bp, Artificial Sequence
  Description of Artificial Sequence: Synthetic oligonucleotide
acattgctagaaaactcatctg

SEQ ID NO: 297 - DNA, 22 bp, Artificial Sequence
  Description of Artificial Sequence: Synthetic oligonucleotide
ttgctagaaaactcatctgaga

SEQ ID NO: 298 - DNA, 22 bp, Artificial Sequence
  Description of Artificial Sequence: Synthetic oligonucleotide
attgctagaaaactcatctgag

SEQ ID NO: 299 - DNA, 22 bp, Artificial Sequence
  Description of Artificial Sequence: Synthetic oligonucleotide
gctagaaaactcatctgagata

SEQ ID NO: 300 - DNA, 22 bp, Artificial Sequence
  Description of Artificial Sequence: Synthetic oligonucleotide
tgctagaaaactcatctgagat

SEQ ID NO: 301 - DNA, 22 bp, Artificial Sequence
  Description of Artificial Sequence: Synthetic oligonucleotide
taagtgggtaagcatctatagc

SEQ ID NO: 302 - DNA, 22 bp, Artificial Sequence
  Description of Artificial Sequence: Synthetic oligonucleotide
gtaagtgggtaagcatctatag

SEQ ID NO: 303 - DNA, 22 bp, Artificial Sequence
  Description of Artificial Sequence: Synthetic oligonucleotide
ataataaagtctagccttaccc

SEQ ID NO: 304 - DNA, 22 bp, Artificial Sequence
  Description of Artificial Sequence: Synthetic oligonucleotide
cataataaagtctagccttacc

SEQ ID NO: 305 - DNA, 22 bp, Artificial Sequence
  Description of Artificial Sequence: Synthetic oligonucleotide
aataaagtctagccttacccca

SEQ ID NO: 306 - DNA, 22 bp, Artificial Sequence
  Description of Artificial Sequence: Synthetic oligonucleotide
taataaagtctagccttacccc

SEQ ID NO: 307 - DNA, 22 bp, Artificial Sequence
  Description of Artificial Sequence: Synthetic oligonucleotide
taaagtctagccttaccccatt

SEQ ID NO: 308 - DNA, 22 bp, Artificial Sequence
  Description of Artificial Sequence: Synthetic oligonucleotide
ataaagtctagccttaccccat

SEQ ID NO: 309 - DNA, 22 bp, Artificial Sequence
  Description of Artificial Sequence: Synthetic oligonucleotide
aagtctagccttaccccattta

SEQ ID NO: 310 - DNA, 22 bp, Artificial Sequence
  Description of Artificial Sequence: Synthetic oligonucleotide
aaagtctagccttaccccattt

SEQ ID NO: 311 - DNA, 22 bp, Artificial Sequence
  Description of Artificial Sequence: Synthetic oligonucleotide
tcataataaagtctagccttac

SEQ ID NO: 312 - DNA, 22 bp, Artificial Sequence
  Description of Artificial Sequence: Synthetic oligonucleotide
tgtacctggtgcaactccttta

SEQ ID NO: 313 - DNA, 22 bp, Artificial Sequence
  Description of Artificial Sequence: Synthetic oligonucleotide
ctgtacctggtgcaactccttt

SEQ ID NO: 314 - DNA, 22 bp, Artificial Sequence
  Description of Artificial Sequence: Synthetic oligonucleotide
tacctggtgcaactcctttatc

SEQ ID NO: 315 - DNA, 22 bp, Artificial Sequence
  Description of Artificial Sequence: Synthetic oligonucleotide
gtacctggtgcaactcctttat

SEQ ID NO: 316 - DNA, 22 bp, Artificial Sequence
  Description of Artificial Sequence: Synthetic oligonucleotide
cctggtgcaactcctttatcag

SEQ ID NO: 317 - DNA, 22 bp, Artificial Sequence
  Description of Artificial Sequence: Synthetic oligonucleotide
acctggtgcaactcctttatca

SEQ ID NO: 318 - DNA, 22 bp, Artificial Sequence
  Description of Artificial Sequence: Synthetic oligonucleotide
tggtgcaactcctttatcagaa

SEQ ID NO: 319 - DNA, 22 bp, Artificial Sequence
  Description of Artificial Sequence: Synthetic oligonucleotide
ctggtgcaactcctttatcaga

SEQ ID NO: 320 - DNA, 22 bp, Artificial Sequence
  Description of Artificial Sequence: Synthetic oligonucleotide
gctgtacctggtgcaactcctt

SEQ ID NO: 321 - DNA, 22 bp, Artificial Sequence
  Description of Artificial Sequence: Synthetic oligonucleotide
gcgagcaagaacaagtgaggcc

SEQ ID NO: 322 - DNA, 22 bp, Artificial Sequence
  Description of Artificial Sequence: Synthetic oligonucleotide
tgcgagcaagaacaagtgaggc

SEQ ID NO: 323 - DNA, 22 bp, Artificial Sequence
  Description of Artificial Sequence: Synthetic oligonucleotide
gagcaagaacaagtgaggccat

SEQ ID NO: 324 - DNA, 22 bp, Artificial Sequence
  Description of Artificial Sequence: Synthetic oligonucleotide
cgagcaagaacaagtgaggcca

SEQ ID NO: 325 - DNA, 22 bp, Artificial Sequence
  Description of Artificial Sequence: Synthetic oligonucleotide
acagtactcagaatcaaaagtt

SEQ ID NO: 326 - DNA, 22 bp, Artificial Sequence
  Description of Artificial Sequence: Synthetic oligonucleotide
cagtactcagaatcaaaagttg

SEQ ID NO: 327 - DNA, 22 bp, Artificial Sequence
  Description of Artificial Sequence: Synthetic oligonucleotide
tactcagaatcaaaagttgtta

SEQ ID NO: 328 - DNA, 22 bp, Artificial Sequence
  Description of Artificial Sequence: Synthetic oligonucleotide
actcagaatcaaaagttgttac

SEQ ID NO: 329 - DNA, 22 bp, Artificial Sequence
  Description of Artificial Sequence: Synthetic oligonucleotide
agtactcagaatcaaaagttgt

SEQ ID NO: 330 - DNA, 22 bp, Artificial Sequence
  Description of Artificial Sequence: Synthetic oligonucleotide
gtactcagaatcaaaagttgtt

SEQ ID NO: 331 - DNA, 22 bp, Artificial Sequence
  Description of Artificial Sequence: Synthetic oligonucleotide
accattagcaacagcctgctca

SEQ ID NO: 332 - DNA, 22 bp, Artificial Sequence
  Description of Artificial Sequence: Synthetic oligonucleotide
ccattagcaacagcctgctcat

SEQ ID NO: 333 - DNA, 22 bp, Artificial Sequence
  Description of Artificial Sequence: Synthetic oligonucleotide
cattagcaacagcctgctcata

SEQ ID NO: 334 - DNA, 22 bp, Artificial Sequence
  Description of Artificial Sequence: Synthetic oligonucleotide
agtgcatcttgatcctcataac

SEQ ID NO: 335 - DNA, 22 bp, Artificial Sequence
  Description of Artificial Sequence: Synthetic oligonucleotide
aagtgcatcttgatcctcataa

SEQ ID NO: 336 - DNA, 22 bp, Artificial Sequence
  Description of Artificial Sequence: Synthetic oligonucleotide
tgcatcttgatcctcataactc

SEQ ID NO: 337 - DNA, 22 bp, Artificial Sequence
  Description of Artificial Sequence: Synthetic oligonucleotide
gtgcatcttgatcctcataact

SEQ ID NO: 338 - DNA, 22 bp, Artificial Sequence
  Description of Artificial Sequence: Synthetic oligonucleotide
catcttgatcctcataactcat

SEQ ID NO: 339 - DNA, 22 bp, Artificial Sequence
  Description of Artificial Sequence: Synthetic oligonucleotide
gcatcttgatcctcataactca

SEQ ID NO: 340 - DNA, 22 bp, Artificial Sequence
  Description of Artificial Sequence: Synthetic oligonucleotide
tcttgatcctcataactcattg

SEQ ID NO: 341 - DNA, 22 bp, Artificial Sequence
  Description of Artificial Sequence: Synthetic oligonucleotide
atcttgatcctcataactcatt

SEQ ID NO: 342 - DNA, 22 bp, Artificial Sequence
  Description of Artificial Sequence: Synthetic oligonucleotide
ttgatcctcataactcattgaa

SEQ ID NO: 343 - DNA, 22 bp, Artificial Sequence
  Description of Artificial Sequence: Synthetic oligonucleotide
cttgatcctcataactcattga

SEQ ID NO: 344 - DNA, 22 bp, Artificial Sequence
  Description of Artificial Sequence: Synthetic oligonucleotide
tgagtgagagcggtgaaccaag

SEQ ID NO: 345 - DNA, 22 bp, Artificial Sequence
  Description of Artificial Sequence: Synthetic oligonucleotide
gagtgagagcggtgaaccaaga

SEQ ID NO: 346 - DNA, 22 bp, Artificial Sequence
  Description of Artificial Sequence: Synthetic oligonucleotide
agtgagagcggtgaaccaagac

SEQ ID NO: 347 - DNA, 22 bp, Artificial Sequence
  Description of Artificial Sequence: Synthetic oligonucleotide
gtgagagcggtgaaccaagacg

SEQ ID NO: 348 - DNA, 22 bp, Artificial Sequence
  Description of Artificial Sequence: Synthetic oligonucleotide
tgataatgttgttgagtgcatc

SEQ ID NO: 349 - DNA, 22 bp, Artificial Sequence
  Description of Artificial Sequence: Synthetic oligonucleotide
ttgataatgttgttgagtgcat

SEQ ID NO: 350 - DNA, 22 bp, Artificial Sequence
  Description of Artificial Sequence: Synthetic oligonucleotide
ataatgttgttgagtgcatcat

SEQ ID NO: 351 - DNA, 22 bp, Artificial Sequence
  Description of Artificial Sequence: Synthetic oligonucleotide
gataatgttgttgagtgcatca

SEQ ID NO: 352 - DNA, 22 bp, Artificial Sequence
  Description of Artificial Sequence: Synthetic oligonucleotide
aatgttgttgagtgcatcatta

SEQ ID NO: 353 - DNA, 22 bp, Artificial Sequence
  Description of Artificial Sequence: Synthetic oligonucleotide
taatgttgttgagtgcatcatt

SEQ ID NO: 354 - DNA, 22 bp, Artificial Sequence
  Description of Artificial Sequence: Synthetic oligonucleotide
tgttgttgagtgcatcattatc

SEQ ID NO: 355 - DNA, 22 bp, Artificial Sequence
  Description of Artificial Sequence: Synthetic oligonucleotide
atgttgttgagtgcatcattat

SEQ ID NO: 356 - DNA, 22 bp, Artificial Sequence
  Description of Artificial Sequence: Synthetic oligonucleotide
gttgataatgttgttgagtgca

SEQ ID NO: 357 - DNA, 22 bp, Artificial Sequence
  Description of Artificial Sequence: Synthetic oligonucleotide
tgttgataatgttgttgagtgc

SEQ ID NO: 358 - DNA, 22 bp, Artificial Sequence
  Description of Artificial Sequence: Synthetic oligonucleotide
ggtgtgacttccatgccaatgc

SEQ ID NO: 359 - DNA, 22 bp, Artificial Sequence
  Description of Artificial Sequence: Synthetic oligonucleotide
aggtgtgacttccatgccaatg

SEQ ID NO: 360 - DNA, 22 bp, Artificial Sequence
  Description of Artificial Sequence: Synthetic oligonucleotide
tgtgacttccatgccaatgcgc

SEQ ID NO: 361 - DNA, 22 bp, Artificial Sequence
  Description of Artificial Sequence: Synthetic oligonucleotide
gtgtgacttccatgccaatgcg

SEQ ID NO: 362 - DNA, 22 bp, Artificial Sequence
  Description of Artificial Sequence: Synthetic oligonucleotide
cgaaggtgtgacttccatgcca

SEQ ID NO: 363 - DNA, 22 bp, Artificial Sequence
  Description of Artificial Sequence: Synthetic oligonucleotide
ccgaaggtgtgacttccatgcc

SEQ ID NO: 364 - DNA, 22 bp, Artificial Sequence
  Description of Artificial Sequence: Synthetic oligonucleotide
aaggtgtgacttccatgccaat

SEQ ID NO: 365 - DNA, 22 bp, Artificial Sequence
  Description of Artificial Sequence: Synthetic oligonucleotide
gaaggtgtgacttccatgccaa

SEQ ID NO: 366 - DNA, 22 bp, Artificial Sequence
  Description of Artificial Sequence: Synthetic oligonucleotide
cccgaaggtgtgacttccatgc

SEQ ID NO: 367 - DNA, 22 bp, Artificial Sequence
  Description of Artificial Sequence: Synthetic oligonucleotide
tcccgaaggtgtgacttccatg

SEQ ID NO: 368 - DNA, 22 bp, Artificial Sequence
  Description of Artificial Sequence: Synthetic oligonucleotide
gcttgactgccgcctctgctcc

SEQ ID NO: 369 - DNA, 22 bp, Artificial Sequence
  Description of Artificial Sequence: Synthetic oligonucleotide
gtccccaaaatttccttgggtt

SEQ ID NO: 370 - DNA, 22 bp, Artificial Sequence
  Description of Artificial Sequence: Synthetic oligonucleotide
gtacaagcaaagcaatattgtc

SEQ ID NO: 371 - DNA, 22 bp, Artificial Sequence
  Description of Artificial Sequence: Synthetic oligonucleotide
acattgttcgtttagttgttaa

SEQ ID NO: 372 - DNA, 22 bp, Artificial Sequence
  Description of Artificial Sequence: Synthetic oligonucleotide
cattgttcgtttagttgttaac

SEQ ID NO: 373 - DNA, 22 bp, Artificial Sequence
  Description of Artificial Sequence: Synthetic oligonucleotide
attgttcgtttagttgttaaca

SEQ ID NO: 374 - DNA, 22 bp, Artificial Sequence
  Description of Artificial Sequence: Synthetic oligonucleotide
ttgttcgtttagttgttaacaa

SEQ ID NO: 375 - DNA, 22 bp, Artificial Sequence
  Description of Artificial Sequence: Synthetic oligonucleotide
tgttcgtttagttgttaacaag

SEQ ID NO: 376 - DNA, 22 bp, Artificial Sequence
  Description of Artificial Sequence: Synthetic oligonucleotide
gttcgtttagttgttaacaaga

SEQ ID NO: 377 - DNA, 22 bp, Artificial Sequence
  Description of Artificial Sequence: Synthetic oligonucleotide
ttcgtttagttgttaacaagaa

SEQ ID NO: 378 - DNA, 22 bp, Artificial Sequence
  Description of Artificial Sequence: Synthetic oligonucleotide
tcgtttagttgttaacaagaac

SEQ ID NO: 379 - DNA, 22 bp, Artificial Sequence
  Description of Artificial Sequence: Synthetic oligonucleotide
cgtttagttgttaacaagaaca

SEQ ID NO: 380 - DNA, 22 bp, Artificial Sequence
  Description of Artificial Sequence: Synthetic oligonucleotide
gtttagttgttaacaagaacat

SEQ ID NO: 381 - DNA, 22 bp, Artificial Sequence
  Description of Artificial Sequence: Synthetic oligonucleotide
agttgtttaacaagcgtgttta

SEQ ID NO: 382 - DNA, 22 bp, Artificial Sequence
  Description of Artificial Sequence: Synthetic oligonucleotide
gttgtttaacaagcgtgtttaa

SEQ ID NO: 383 - DNA, 22 bp, Artificial Sequence
  Description of Artificial Sequence: Synthetic oligonucleotide
taagttgtttaacaagcgtgtt

SEQ ID NO: 384 - DNA, 22 bp, Artificial Sequence
  Description of Artificial Sequence: Synthetic oligonucleotide
aagttgtttaacaagcgtgttt

SEQ ID NO: 385 - DNA, 22 bp, Artificial Sequence
  Description of Artificial Sequence: Synthetic oligonucleotide
agctaagttgtttaacaagcgt

SEQ ID NO: 386 - DNA, 22 bp, Artificial Sequence
  Description of Artificial Sequence: Synthetic oligonucleotide
ttcttagtgacagtttggcctt

SEQ ID NO: 387 - DNA, 22 bp, Artificial Sequence
  Description of Artificial Sequence: Synthetic oligonucleotide
tcttagtgacagtttggccttg

SEQ ID NO: 388 - DNA, 22 bp, Artificial Sequence
  Description of Artificial Sequence: Synthetic oligonucleotide
cttagtgacagtttggccttgt

SEQ ID NO: 389 - DNA, 22 bp, Artificial Sequence
  Description of Artificial Sequence: Synthetic oligonucleotide
ttagtgacagtttggccttgtt

SEQ ID NO: 390 - DNA, 22 bp, Artificial Sequence
  Description of Artificial Sequence: Synthetic oligonucleotide
agatttcttagtgacagtttgg

SEQ ID NO: 391 - DNA, 22 bp, Artificial Sequence
  Description of Artificial Sequence: Synthetic oligonucleotide
gatttcttagtgacagtttggc

SEQ ID NO: 392 - DNA, 22 bp, Artificial Sequence
  Description of Artificial Sequence: Synthetic oligonucleotide
atttcttagtgacagtttggcc

SEQ ID NO: 393 - DNA, 22 bp, Artificial Sequence
  Description of Artificial Sequence: Synthetic oligonucleotide
tttcttagtgacagtttggcct

SEQ ID NO: 394 - DNA, 22 bp, Artificial Sequence
  Description of Artificial Sequence: Synthetic oligonucleotide
cagatttcttagtgacagtttg

SEQ ID NO: 395 - DNA, 22 bp, Artificial Sequence
  Description of Artificial Sequence: Synthetic oligonucleotide
acgcagtattattgggtaaacc

SEQ ID NO: 396 - DNA, 22 bp, Artificial Sequence
  Description of Artificial Sequence: Synthetic oligonucleotide
cgcagtattattgggtaaacct

SEQ ID NO: 397 - DNA, 22 bp, Artificial Sequence
  Description of Artificial Sequence: Synthetic oligonucleotide
agacgcagtattattgggtaaa

SEQ ID NO: 398 - DNA, 22 bp, Artificial Sequence
  Description of Artificial Sequence: Synthetic oligonucleotide
gacgcagtattattgggtaaac

SEQ ID NO: 399 - DNA, 22 bp, Artificial Sequence
  Description of Artificial Sequence: Synthetic oligonucleotide
aagacgcagtattattgggtaa

SEQ ID NO: 400 - DNA, 22 bp, Artificial Sequence
  Description of Artificial Sequence: Synthetic oligonucleotide
accaagacgcagtattattggg

SEQ ID NO: 401 - DNA, 22 bp, Artificial Sequence
  Description of Artificial Sequence: Synthetic oligonucleotide
tacaaggtggttccagttctgt

SEQ ID NO: 402 - DNA, 22 bp, Artificial Sequence
  Description of Artificial Sequence: Synthetic oligonucleotide
acaaggtggttccagttctgta

SEQ ID NO: 403 - DNA, 22 bp, Artificial Sequence
  Description of Artificial Sequence: Synthetic oligonucleotide
caaggtggttccagttctgtat

SEQ ID NO: 404 - DNA, 22 bp, Artificial Sequence
  Description of Artificial Sequence: Synthetic oligonucleotide
aaggtggttccagttctgtata

SEQ ID NO: 405 - DNA, 22 bp, Artificial Sequence
  Description of Artificial Sequence: Synthetic oligonucleotide
agcattaatacagccaccatcg

SEQ ID NO: 406 - DNA, 22 bp, Artificial Sequence
  Description of Artificial Sequence: Synthetic oligonucleotide
tagcattaatacagccaccatc

SEQ ID NO: 407 - DNA, 22 bp, Artificial Sequence
  Description of Artificial Sequence: Synthetic oligonucleotide
cattaatacagccaccatcgta

SEQ ID NO: 408 - DNA, 22 bp, Artificial Sequence
  Description of Artificial Sequence: Synthetic oligonucleotide
gcattaatacagccaccatcgt

SEQ ID NO: 409 - DNA, 22 bp, Artificial Sequence
  Description of Artificial Sequence: Synthetic oligonucleotide
ttaatacagccaccatcgtaac

SEQ ID NO: 410 - DNA, 22 bp, Artificial Sequence
  Description of Artificial Sequence: Synthetic oligonucleotide
attaatacagccaccatcgtaa

SEQ ID NO: 411 - DNA, 22 bp, Artificial Sequence
  Description of Artificial Sequence: Synthetic oligonucleotide
aatacagccaccatcgtaacaa

SEQ ID NO: 412 - DNA, 22 bp, Artificial Sequence
  Description of Artificial Sequence: Synthetic oligonucleotide
taatacagccaccatcgtaaca

SEQ ID NO: 413 - DNA, 22 bp, Artificial Sequence
  Description of Artificial Sequence: Synthetic oligonucleotide
tacagccaccatcgtaacaatc

SEQ ID NO: 414 - DNA, 22 bp, Artificial Sequence
  Description of Artificial Sequence: Synthetic oligonucleotide
atacagccaccatcgtaacaat

SEQ ID NO: 415 - DNA, 22 bp, Artificial Sequence
  Description of Artificial Sequence: Synthetic oligonucleotide
gcatttcagtagtgccaccagc

SEQ ID NO: 416 - DNA, 22 bp, Artificial Sequence
  Description of Artificial Sequence: Synthetic oligonucleotide
catttcagtagtgccaccagcc

SEQ ID NO: 417 - DNA, 22 bp, Artificial Sequence
  Description of Artificial Sequence: Synthetic oligonucleotide
atttcagtagtgccaccagcct

SEQ ID NO: 418 - DNA, 22 bp, Artificial Sequence
  Description of Artificial Sequence: Synthetic oligonucleotide
tttcagtagtgccaccagcctt

SEQ ID NO: 419 - DNA, 22 bp, Artificial Sequence
  Description of Artificial Sequence: Synthetic oligonucleotide
ttcagtagtgccaccagccttt

SEQ ID NO: 420 - DNA, 22 bp, Artificial Sequence
  Description of Artificial Sequence: Synthetic oligonucleotide
gattcttgatggatctgggtaa

SEQ ID NO: 421 - DNA, 22 bp, Artificial Sequence
  Description of Artificial Sequence: Synthetic oligonucleotide
attcttgatggatctgggtaag

SEQ ID NO: 422 - DNA, 22 bp, Artificial Sequence
  Description of Artificial Sequence: Synthetic oligonucleotide
cttgatggatctgggtaaggaa

SEQ ID NO: 423 - DNA, 22 bp, Artificial Sequence
  Description of Artificial Sequence: Synthetic oligonucleotide
ttgatggatctgggtaaggaag

SEQ ID NO: 424 - DNA, 22 bp, Artificial Sequence
  Description of Artificial Sequence: Synthetic oligonucleotide
ttcttgatggatctgggtaagg

SEQ ID NO: 425 - DNA, 22 bp, Artificial Sequence
  Description of Artificial Sequence: Synthetic oligonucleotide
tcttgatggatctgggtaagga

SEQ ID NO: 426 - DNA, 22 bp, Artificial Sequence
  Description of Artificial Sequence: Synthetic oligonucleotide
ttctcataaacaaatccataag

SEQ ID NO: 427 - DNA, 22 bp, Artificial Sequence
  Description of Artificial Sequence: Synthetic oligonucleotide
taaacaaatccataagttcgtt

SEQ ID NO: 428 - DNA, 22 bp, Artificial Sequence
  Description of Artificial Sequence: Synthetic oligonucleotide
aaacaaatccataagttcgttt

SEQ ID NO: 429 - DNA, 22 bp, Artificial Sequence
  Description of Artificial Sequence: Synthetic oligonucleotide
aacaaatccataagttcgttta

SEQ ID NO: 430 - DNA, 22 bp, Artificial Sequence
  Description of Artificial Sequence: Synthetic oligonucleotide
acaaatccataagttcgtttat

SEQ ID NO: 431 - DNA, 22 bp, Artificial Sequence
  Description of Artificial Sequence: Synthetic oligonucleotide
ctcataaacaaatccataagtt

SEQ ID NO: 432 - DNA, 22 bp, Artificial Sequence
  Description of Artificial Sequence: Synthetic oligonucleotide
tcataaacaaatccataagttc

SEQ ID NO: 433 - DNA, 22 bp, Artificial Sequence
  Description of Artificial Sequence: Synthetic oligonucleotide
cataaacaaatccataagttcg

SEQ ID NO: 434 - DNA, 22 bp, Artificial Sequence
  Description of Artificial Sequence: Synthetic oligonucleotide
ataaacaaatccataagttcgt

SEQ ID NO: 435 - DNA, 22 bp, Artificial Sequence
  Description of Artificial Sequence: Synthetic oligonucleotide
gcaagattagcagaagctctga

SEQ ID NO: 436 - DNA, 22 bp, Artificial Sequence
  Description of Artificial Sequence: Synthetic oligonucleotide
agcaagattagcagaagctctg

SEQ ID NO: 437 - DNA, 22 bp, Artificial Sequence
  Description of Artificial Sequence: Synthetic oligonucleotide
cagcaagattagcagaagctct

SEQ ID NO: 438 - DNA, 22 bp, Artificial Sequence
  Description of Artificial Sequence: Synthetic oligonucleotide
gcagcaagattagcagaagctc

SEQ ID NO: 439 - DNA, 22 bp, Artificial Sequence
  Description of Artificial Sequence: Synthetic oligonucleotide
ttgatctaaagcattaccataa

SEQ ID NO: 440 - DNA, 22 bp, Artificial Sequence
  Description of Artificial Sequence: Synthetic oligonucleotide
tgatctaaagcattaccataat

SEQ ID NO: 441 - DNA, 22 bp, Artificial Sequence
  Description of Artificial Sequence: Synthetic oligonucleotide
gatctaaagcattaccataata

SEQ ID NO: 442 - DNA, 22 bp, Artificial Sequence
  Description of Artificial Sequence: Synthetic oligonucleotide
ggtctgtgtttaatttatagtt

SEQ ID NO: 443 - DNA, 22 bp, Artificial Sequence
  Description of Artificial Sequence: Synthetic oligonucleotide
ctgttctaatgttgaattcact

SEQ ID NO: 444 - DNA, 22 bp, Artificial Sequence
  Description of Artificial Sequence: Synthetic oligonucleotide
tgttctaatgttgaattcactt

SEQ ID NO: 445 - DNA, 22 bp, Artificial Sequence
  Description of Artificial Sequence: Synthetic oligonucleotide
gttctaatgttgaattcacttt

SEQ ID NO: 446 - DNA, 22 bp, Artificial Sequence
  Description of Artificial Sequence: Synthetic oligonucleotide
ttctaatgttgaattcactttg

SEQ ID NO: 447 - DNA, 22 bp, Artificial Sequence
  Description of Artificial Sequence: Synthetic oligonucleotide
tctaatgttgaattcactttga

SEQ ID NO: 448 - DNA, 22 bp, Artificial Sequence
  Description of Artificial Sequence: Synthetic oligonucleotide
ctaatgttgaattcactttgaa

SEQ ID NO: 449 - DNA, 22 bp, Artificial Sequence
  Description of Artificial Sequence: Synthetic oligonucleotide
aatgttgaattcactttgaatt

SEQ ID NO: 450 - DNA, 22 bp, Artificial Sequence
  Description of Artificial Sequence: Synthetic oligonucleotide
tactgttctaatgttgaattca

SEQ ID NO: 451 - DNA, 22 bp, Artificial Sequence
  Description of Artificial Sequence: Synthetic oligonucleotide
actgttctaatgttgaattcac

SEQ ID NO: 452 - DNA, 22 bp, Artificial Sequence
  Description of Artificial Sequence: Synthetic oligonucleotide
aggctctgttggtgggaatgtt

SEQ ID NO: 453 - DNA, 22 bp, Artificial Sequence
  Description of Artificial Sequence: Synthetic oligonucleotide
ggctctgttggtgggaatgttt

SEQ ID NO: 454 - DNA, 22 bp, Artificial Sequence
  Description of Artificial Sequence: Synthetic oligonucleotide
tcatagaagtctttgttaaaat

SEQ ID NO: 455 - DNA, 22 bp, Artificial Sequence
  Description of Artificial Sequence: Synthetic oligonucleotide
catagaagtctttgttaaaatt

SEQ ID NO: 456 - DNA, 22 bp, Artificial Sequence
  Description of Artificial Sequence: Synthetic oligonucleotide
aagtctttgttaaaattaccgg

SEQ ID NO: 457 - DNA, 22 bp, Artificial Sequence
  Description of Artificial Sequence: Synthetic oligonucleotide
agtctttgttaaaattaccggg

SEQ ID NO: 458 - DNA, 22 bp, Artificial Sequence
  Description of Artificial Sequence: Synthetic oligonucleotide
gtctttgttaaaattaccgggt

SEQ ID NO: 459 - DNA, 22 bp, Artificial Sequence
  Description of Artificial Sequence: Synthetic oligonucleotide
tctttgttaaaattaccgggtt

SEQ ID NO: 460 - DNA, 22 bp, Artificial Sequence
  Description of Artificial Sequence: Synthetic oligonucleotide
tctggttctagtgtgcccttag

SEQ ID NO: 461 - DNA, 22 bp, Artificial Sequence
  Description of Artificial Sequence: Synthetic oligonucleotide
aataatagctcatacctcctaa

SEQ ID NO: 462 - DNA, 22 bp, Artificial Sequence
  Description of Artificial Sequence: Synthetic oligonucleotide
caataatagctcatacctccta

SEQ ID NO: 463 - DNA, 22 bp, Artificial Sequence
  Description of Artificial Sequence: Synthetic oligonucleotide
acaataatagctcatacctcct

SEQ ID NO: 464 - DNA, 22 bp, Artificial Sequence
  Description of Artificial Sequence: Synthetic oligonucleotide
tacaataatagctcatacctcc

SEQ ID NO: 465 - DNA, 22 bp, Artificial Sequence
  Description of Artificial Sequence: Synthetic oligonucleotide
ttacaataatagctcatacctc

SEQ ID NO: 466 - DNA, 22 bp, Artificial Sequence
  Description of Artificial Sequence: Synthetic oligonucleotide
tcagtgccaagctcgtcgccta

SEQ ID NO: 467 - DNA, 22 bp, Artificial Sequence
  Description of Artificial Sequence: Synthetic oligonucleotide
cagtgccaagctcgtcgcctaa

SEQ ID NO: 468 - DNA, 22 bp, Artificial Sequence
  Description of Artificial Sequence: Synthetic oligonucleotide
gatcagtgccaagctcgtcgcc

SEQ ID NO: 469 - DNA, 22 bp, Artificial Sequence
  Description of Artificial Sequence: Synthetic oligonucleotide
atcagtgccaagctcgtcgcct

SEQ ID NO: 470 - DNA, 22 bp, Artificial Sequence
  Description of Artificial Sequence: Synthetic oligonucleotide
ggatcagtgccaagctcgtcgc

SEQ ID NO: 471 - DNA, 22 bp, Artificial Sequence
  Description of Artificial Sequence: Synthetic oligonucleotide
caccctgcatggaaagcaaaac

SEQ ID NO: 472 - DNA, 22 bp, Artificial Sequence
  Description of Artificial Sequence: Synthetic oligonucleotide
gcaccctgcatggaaagcaaaa

SEQ ID NO: 473 - DNA, 22 bp, Artificial Sequence
  Description of Artificial Sequence: Synthetic oligonucleotide
ccctgcatggaaagcaaaacag

SEQ ID NO: 474 - DNA, 22 bp, Artificial Sequence
  Description of Artificial Sequence: Synthetic oligonucleotide
accctgcatggaaagcaaaaca

SEQ ID NO: 475 - DNA, 22 bp, Artificial Sequence
  Description of Artificial Sequence: Synthetic oligonucleotide
cctgcatggaaagcaaaacaga

SEQ ID NO: 476 - DNA, 22 bp, Artificial Sequence
  Description of Artificial Sequence: Synthetic oligonucleotide
accgcaaacccgtttaaaaacg

SEQ ID NO: 477 - DNA, 22 bp, Artificial Sequence
  Description of Artificial Sequence: Synthetic oligonucleotide
ccgcaaacccgtttaaaaacga

SEQ ID NO: 478 - DNA, 22 bp, Artificial Sequence
  Description of Artificial Sequence: Synthetic oligonucleotide
acaccgcaaacccgtttaaaaa

SEQ ID NO: 479 - DNA, 22 bp, Artificial Sequence
  Description of Artificial Sequence: Synthetic oligonucleotide
caccgcaaacccgtttaaaaac

SEQ ID NO: 480 - DNA, 22 bp, Artificial Sequence
  Description of Artificial Sequence: Synthetic oligonucleotide
ttacaccgcaaacccgtttaaa

SEQ ID NO: 481 - DNA, 22 bp, Artificial Sequence
  Description of Artificial Sequence: Synthetic oligonucleotide
tacaccgcaaacccgtttaaaa

SEQ ID NO: 482 - DNA, 22 bp, Artificial Sequence
  Description of Artificial Sequence: Synthetic oligonucleotide
acttacaccgcaaacccgttta

SEQ ID NO: 483 - DNA, 22 bp, Artificial Sequence
  Description of Artificial Sequence: Synthetic oligonucleotide
cttacaccgcaaacccgtttaa

SEQ ID NO: 484 - DNA, 22 bp, Artificial Sequence
  Description of Artificial Sequence: Synthetic oligonucleotide
gcacttacaccgcaaacccgtt

SEQ ID NO: 485 - DNA, 22 bp, Artificial Sequence
  Description of Artificial Sequence: Synthetic oligonucleotide
cacttacaccgcaaacccgttt

SEQ ID NO: 486 - DNA, 22 bp, Artificial Sequence
  Description of Artificial Sequence: Synthetic oligonucleotide
ccgccacacatgaccatttcac

SEQ ID NO: 487 - DNA, 22 bp, Artificial Sequence
  Description of Artificial Sequence: Synthetic oligonucleotide
gtgaaccgccacacatgaccat

SEQ ID NO: 488 - DNA, 22 bp, Artificial Sequence
  Description of Artificial Sequence: Synthetic oligonucleotide
tagtgaaccgccacacatgacc

SEQ ID NO: 489 - DNA, 22 bp, Artificial Sequence
  Description of Artificial Sequence: Synthetic oligonucleotide
agtgaaccgccacacatgacca

SEQ ID NO: 490 - DNA, 22 bp, Artificial Sequence
  Description of Artificial Sequence: Synthetic oligonucleotide
tatagtgaaccgccacacatga

SEQ ID NO: 491 - DNA, 22 bp, Artificial Sequence
  Description of Artificial Sequence: Synthetic oligonucleotide
atagtgaaccgccacacatgac

SEQ ID NO: 492 - DNA, 22 bp, Artificial Sequence
  Description of Artificial Sequence: Synthetic oligonucleotide
gtccaccaaacgtaatgcgggg

SEQ ID NO: 493 - DNA, 22 bp, Artificial Sequence
  Description of Artificial Sequence: Synthetic oligonucleotide
ggtccaccaaacgtaatgcggg

SEQ ID NO: 494 - DNA, 22 bp, Artificial Sequence
  Description of Artificial Sequence: Synthetic oligonucleotide
gggtccaccaaacgtaatgcgg

SEQ ID NO: 495 - DNA, 22 bp, Artificial Sequence
  Description of Artificial Sequence: Synthetic oligonucleotide
tacgaagaagaaccttgcggta

SEQ ID NO: 496 - DNA, 22 bp, Artificial Sequence
  Description of Artificial Sequence: Synthetic oligonucleotide
attcatgaggtcctttagtaag

SEQ ID NO: 497 - DNA, 22 bp, Artificial Sequence
  Description of Artificial Sequence: Synthetic oligonucleotide
aattcatgaggtcctttagtaa

SEQ ID NO: 498 - DNA, 22 bp, Artificial Sequence
  Description of Artificial Sequence: Synthetic oligonucleotide
accacgaaagcaagaaaaagaa

SEQ ID NO: 499 - DNA, 22 bp, Artificial Sequence
  Description of Artificial Sequence: Synthetic oligonucleotide
taccacgaaagcaagaaaaaga

SEQ ID NO: 500 - DNA, 22 bp, Artificial Sequence
  Description of Artificial Sequence: Synthetic oligonucleotide
ataccacgaaagcaagaaaaag

SEQ ID NO: 501 - DNA, 22 bp, Artificial Sequence
  Description of Artificial Sequence: Synthetic oligonucleotide
aataccacgaaagcaagaaaaa

SEQ ID NO: 502 - DNA, 22 bp, Artificial Sequence
  Description of Artificial Sequence: Synthetic oligonucleotide
cgaaagcaagaaaaagaagtac

SEQ ID NO: 503 - DNA, 22 bp, Artificial Sequence
  Description of Artificial Sequence: Synthetic oligonucleotide
acgaaagcaagaaaaagaagta

SEQ ID NO: 504 - DNA, 22 bp, Artificial Sequence
  Description of Artificial Sequence: Synthetic oligonucleotide
cacgaaagcaagaaaaagaagt

SEQ ID NO: 505 - DNA, 22 bp, Artificial Sequence
  Description of Artificial Sequence: Synthetic oligonucleotide
ccacgaaagcaagaaaaagaag

SEQ ID NO: 506 - DNA, 22 bp, Artificial Sequence
  Description of Artificial Sequence: Synthetic oligonucleotide
gaataccacgaaagcaagaaaa

SEQ ID NO: 507 - DNA, 22 bp, Artificial Sequence
  Description of Artificial Sequence: Synthetic oligonucleotide
agaataccacgaaagcaagaaa

SEQ ID NO: 508 - DNA, 22 bp, Artificial Sequence
  Description of Artificial Sequence: Synthetic oligonucleotide
tttggcaatgttgttccttgag

SEQ ID NO: 509 - DNA, 22 bp, Artificial Sequence
  Description of Artificial Sequence: Synthetic oligonucleotide
atgttgttccttgaggaagttg

SEQ ID NO: 510 - DNA, 22 bp, Artificial Sequence
  Description of Artificial Sequence: Synthetic oligonucleotide
tgttgttccttgaggaagttgt

SEQ ID NO: 511 - DNA, 22 bp, Artificial Sequence
  Description of Artificial Sequence: Synthetic oligonucleotide
caatgttgttccttgaggaagt

SEQ ID NO: 512 - DNA, 22 bp, Artificial Sequence
  Description of Artificial Sequence: Synthetic oligonucleotide
aatgttgttccttgaggaagtt

SEQ ID NO: 513 - DNA, 22 bp, Artificial Sequence
  Description of Artificial Sequence: Synthetic oligonucleotide
ggcaatgttgttccttgaggaa

SEQ ID NO: 514 - DNA, 22 bp, Artificial Sequence
  Description of Artificial Sequence: Synthetic oligonucleotide
gcaatgttgttccttgaggaag

SEQ ID NO: 515 - DNA, 22 bp, Artificial Sequence
  Description of Artificial Sequence: Synthetic oligonucleotide
ttggcaatgttgttccttgagg

SEQ ID NO: 516 - DNA, 22 bp, Artificial Sequence
  Description of Artificial Sequence: Synthetic oligonucleotide
tggcaatgttgttccttgagga

SEQ ID NO: 517 - DNA, 22 bp, Artificial Sequence
  Description of Artificial Sequence: Synthetic oligonucleotide
tggtccccaaaatttccttggg

SEQ ID NO: 518 - DNA, 22 bp, Artificial Sequence
  Description of Artificial Sequence: Synthetic oligonucleotide
ggtccccaaaatttccttgggt

SEQ ID NO: 519 - DNA, 22 bp, Artificial Sequence
  Description of Artificial Sequence: Synthetic oligonucleotide
ctaatttcactaagttgaacaa

SEQ ID NO: 520 - DNA, 22 bp, Artificial Sequence
  Description of Artificial Sequence: Synthetic oligonucleotide
taatttcactaagttgaacaat

SEQ ID NO: 521 - DNA, 22 bp, Artificial Sequence
  Description of Artificial Sequence: Synthetic oligonucleotide
aatttcactaagttgaacaatt

SEQ ID NO: 522 - DNA, 22 bp, Artificial Sequence
  Description of Artificial Sequence: Synthetic oligonucleotide
atttcactaagttgaacaattt

SEQ ID NO: 523 - DNA, 22 bp, Artificial Sequence
  Description of Artificial Sequence: Synthetic oligonucleotide
ttggttctcatagagaacattc

SEQ ID NO: 524 - DNA, 22 bp, Artificial Sequence
  Description of Artificial Sequence: Synthetic oligonucleotide
tttggttctcatagagaacatt

SEQ ID NO: 525 - DNA, 22 bp, Artificial Sequence
  Description of Artificial Sequence: Synthetic oligonucleotide
gtccatcaaagtgtcccttatt

SEQ ID NO: 526 - DNA, 22 bp, Artificial Sequence
  Description of Artificial Sequence: Synthetic oligonucleotide
gtcacaaaatcctttaggattt

SEQ ID NO: 527 - DNA, 22 bp, Artificial Sequence
  Description of Artificial Sequence: Synthetic oligonucleotide
agtcacaaaatcctttaggatt

SEQ ID NO: 528 - DNA, 22 bp, Artificial Sequence
  Description of Artificial Sequence: Synthetic oligonucleotide
atcctttaggatttggatgatc

SEQ ID NO: 529 - DNA, 22 bp, Artificial Sequence
  Description of Artificial Sequence: Synthetic oligonucleotide
aatcctttaggatttggatgat

SEQ ID NO: 530 - DNA, 22 bp, Artificial Sequence
  Description of Artificial Sequence: Synthetic oligonucleotide
aaaatcctttaggatttggatg

SEQ ID NO: 531 - DNA, 22 bp, Artificial Sequence
  Description of Artificial Sequence: Synthetic oligonucleotide
caaaatcctttaggatttggat

SEQ ID NO: 532 - DNA, 22 bp, Artificial Sequence
  Description of Artificial Sequence: Synthetic oligonucleotide
acaaaatcctttaggatttgga

SEQ ID NO: 533 - DNA, 22 bp, Artificial Sequence
  Description of Artificial Sequence: Synthetic oligonucleotide
cacaaaatcctttaggatttgg

SEQ ID NO: 534 - DNA, 22 bp, Artificial Sequence
  Description of Artificial Sequence: Synthetic oligonucleotide
tcacaaaatcctttaggatttg

SEQ ID NO: 535 - DNA, 22 bp, Artificial Sequence
  Description of Artificial Sequence: Synthetic oligonucleotide
aaggaataggaaacctattact

SEQ ID NO: 536 - DNA, 22 bp, Artificial Sequence
  Description of Artificial Sequence: Synthetic oligonucleotide
gaataggaaacctattactagg

SEQ ID NO: 537 - DNA, 22 bp, Artificial Sequence
  Description of Artificial Sequence: Synthetic oligonucleotide
aataggaaacctattactaggt

SEQ ID NO: 538 - DNA, 22 bp, Artificial Sequence
  Description of Artificial Sequence: Synthetic oligonucleotide
aggaataggaaacctattacta

SEQ ID NO: 539 - DNA, 22 bp, Artificial Sequence
  Description of Artificial Sequence: Synthetic oligonucleotide
ggaataggaaacctattactag

SEQ ID NO: 540 - DNA, 22 bp, Artificial Sequence
  Description of Artificial Sequence: Synthetic oligonucleotide
atcagttccttgtctgattagt

SEQ ID NO: 541 - DNA, 22 bp, Artificial Sequence
  Description of Artificial Sequence: Synthetic oligonucleotide
cagttccttgtctgattagttc

SEQ ID NO: 542 - DNA, 22 bp, Artificial Sequence
  Description of Artificial Sequence: Synthetic oligonucleotide
tcagttccttgtctgattagtt

SEQ ID NO: 543 - DNA, 22 bp, Artificial Sequence
  Description of Artificial Sequence: Synthetic oligonucleotide
taatcagttccttgtctgatta

SEQ ID NO: 544 - DNA, 22 bp, Artificial Sequence
  Description of Artificial Sequence: Synthetic oligonucleotide
gtaatcagttccttgtctgatt

SEQ ID NO: 545 - DNA, 22 bp, Artificial Sequence
  Description of Artificial Sequence: Synthetic oligonucleotide
caaagaagatgtacattctaac

SEQ ID NO: 546 - DNA, 22 bp, Artificial Sequence
  Description of Artificial Sequence: Synthetic oligonucleotide
gcaaagaagatgtacattctaa

SEQ ID NO: 547 - DNA, 22 bp, Artificial Sequence
  Description of Artificial Sequence: Synthetic oligonucleotide
gcattgtctaacaacatcaaaa

SEQ ID NO: 548 - DNA, 22 bp, Artificial Sequence
  Description of Artificial Sequence: Synthetic oligonucleotide
aaagaagatgtacattctaacc

SEQ ID NO: 549 - DNA, 22 bp, Artificial Sequence
  Description of Artificial Sequence: Synthetic oligonucleotide
agaagatgtacattctaaccat

SEQ ID NO: 550 - DNA, 22 bp, Artificial Sequence
  Description of Artificial Sequence: Synthetic oligonucleotide
taatctatgttaaaaccaacac

SEQ ID NO: 551 - DNA, 22 bp, Artificial Sequence
  Description of Artificial Sequence: Synthetic oligonucleotide
ataatctatgttaaaaccaaca

SEQ ID NO: 552 - DNA, 22 bp, Artificial Sequence
  Description of Artificial Sequence: Synthetic oligonucleotide
cataatctatgttaaaaccaac

SEQ ID NO: 553 - DNA, 22 bp, Artificial Sequence
  Description of Artificial Sequence: Synthetic oligonucleotide
tcataatctatgttaaaaccaa

SEQ ID NO: 554 - DNA, 22 bp, Artificial Sequence
  Description of Artificial Sequence: Synthetic oligonucleotide
tcacacccggacgaaacctaga

SEQ ID NO: 555 - DNA, 22 bp, Artificial Sequence
  Description of Artificial Sequence: Synthetic oligonucleotide
cacacccggacgaaacctagat

SEQ ID NO: 556 - DNA, 22 bp, Artificial Sequence
  Description of Artificial Sequence: Synthetic oligonucleotide
atgaaagatgtaattctctgtc

SEQ ID NO: 557 - DNA, 22 bp, Artificial Sequence
  Description of Artificial Sequence: Synthetic oligonucleotide
tgaaagatgtaattctctgtca

SEQ ID NO: 558 - DNA, 22 bp, Artificial Sequence
  Description of Artificial Sequence: Synthetic oligonucleotide
gaaagatgtaattctctgtcag

SEQ ID NO: 559 - DNA, 22 bp, Artificial Sequence
  Description of Artificial Sequence: Synthetic oligonucleotide
aaagatgtaattctctgtcaga

SEQ ID NO: 560 - DNA, 22 bp, Artificial Sequence
  Description of Artificial Sequence: Synthetic oligonucleotide
tcacaattaccttcatcaaaat

SEQ ID NO: 561 - DNA, 22 bp, Artificial Sequence
  Description of Artificial Sequence: Synthetic oligonucleotide
cacaattaccttcatcaaaatg

SEQ ID NO: 562 - DNA, 22 bp, Artificial Sequence
  Description of Artificial Sequence: Synthetic oligonucleotide
caacaacttcaactacaaatag

SEQ ID NO: 563 - DNA, 22 bp, Artificial Sequence
  Description of Artificial Sequence: Synthetic oligonucleotide
atcaacaacttcaactacaaat

SEQ ID NO: 564 - DNA, 22 bp, Artificial Sequence
  Description of Artificial Sequence: Synthetic oligonucleotide
tcaacaacttcaactacaaata

SEQ ID NO: 565 - DNA, 22 bp, Artificial Sequence
  Description of Artificial Sequence: Synthetic oligonucleotide
gtatgcagcaaaacctgagtca

SEQ ID NO: 566 - DNA, 22 bp, Artificial Sequence
  Description of Artificial Sequence: Synthetic oligonucleotide
tgtatgcagcaaaacctgagtc

SEQ ID NO: 567 - DNA, 22 bp, Artificial Sequence
  Description of Artificial Sequence: Synthetic oligonucleotide
tgtggcactagtgtaggtgcac

SEQ ID NO: 568 - DNA, 22 bp, Artificial Sequence
  Description of Artificial Sequence: Synthetic oligonucleotide
ttgtggcactagtgtaggtgca

SEQ ID NO: 569 - DNA, 22 bp, Artificial Sequence
  Description of Artificial Sequence: Synthetic oligonucleotide
gtggcactagtgtaggtgcact

SEQ ID NO: 570 - DNA, 22 bp, Artificial Sequence
  Description of Artificial Sequence: Synthetic oligonucleotide
gccatttgcatagcaaatggta

SEQ ID NO: 571 - DNA, 22 bp, Artificial Sequence
  Description of Artificial Sequence: Synthetic oligonucleotide
atttgcatagcaaatggtattt

SEQ ID NO: 572 - DNA, 22 bp, Artificial Sequence
  Description of Artificial Sequence: Synthetic oligonucleotide
tttgcatagcaaatggtatttg

SEQ ID NO: 573 - DNA, 22 bp, Artificial Sequence
  Description of Artificial Sequence: Synthetic oligonucleotide
ccatttgcatagcaaatggtat

SEQ ID NO: 574 - DNA, 22 bp, Artificial Sequence
  Description of Artificial Sequence: Synthetic oligonucleotide
catttgcatagcaaatggtatt

SEQ ID NO: 575 - DNA, 22 bp, Artificial Sequence
  Description of Artificial Sequence: Synthetic oligonucleotide
atatttagttcgtttagaccag

SEQ ID NO: 576 - DNA, 22 bp, Artificial Sequence
  Description of Artificial Sequence: Synthetic oligonucleotide
aatatttagttcgtttagacca

SEQ ID NO: 577 - DNA, 22 bp, Artificial Sequence
  Description of Artificial Sequence: Synthetic oligonucleotide
tagtcccagatcacagtattag

SEQ ID NO: 578 - DNA, 22 bp, Artificial Sequence
  Description of Artificial Sequence: Synthetic oligonucleotide
gtagtcccagatcacagtatta

SEQ ID NO: 579 - DNA, 22 bp, Artificial Sequence
  Description of Artificial Sequence: Synthetic oligonucleotide
gtcccagatcacagtattagca

SEQ ID NO: 580 - DNA, 22 bp, Artificial Sequence
  Description of Artificial Sequence: Synthetic oligonucleotide
agtcccagatcacagtattagc

SEQ ID NO: 581 - DNA, 22 bp, Artificial Sequence
  Description of Artificial Sequence: Synthetic oligonucleotide
cccagatcacagtattagcagc

SEQ ID NO: 582 - DNA, 22 bp, Artificial Sequence
  Description of Artificial Sequence: Synthetic oligonucleotide
tcccagatcacagtattagcag

SEQ ID NO: 583 - DNA, 22 bp, Artificial Sequence
  Description of Artificial Sequence: Synthetic oligonucleotide
gtggtccaaaacttgtaggtgg

SEQ ID NO: 584 - DNA, 22 bp, Artificial Sequence
  Description of Artificial Sequence: Synthetic oligonucleotide
cgggtgataaacatgttagggt

SEQ ID NO: 585 - DNA, 22 bp, Artificial Sequence
  Description of Artificial Sequence: Synthetic oligonucleotide
gggtgataaacatgttagggta

SEQ ID NO: 586 - DNA, 22 bp, Artificial Sequence
  Description of Artificial Sequence: Synthetic oligonucleotide
ataaacatgttagggtaaccat

SEQ ID NO: 587 - DNA, 22 bp, Artificial Sequence
  Description of Artificial Sequence: Synthetic oligonucleotide
taaacatgttagggtaaccatt

SEQ ID NO: 588 - DNA, 22 bp, Artificial Sequence
  Description of Artificial Sequence: Synthetic oligonucleotide
ggtgataaacatgttagggtaa

SEQ ID NO: 589 - DNA, 22 bp, Artificial Sequence
  Description of Artificial Sequence: Synthetic oligonucleotide
gtgataaacatgttagggtaac

SEQ ID NO: 590 - DNA, 22 bp, Artificial Sequence
  Description of Artificial Sequence: Synthetic oligonucleotide
tgataaacatgttagggtaacc

SEQ ID NO: 591 - DNA, 22 bp, Artificial Sequence
  Description of Artificial Sequence: Synthetic oligonucleotide
gataaacatgttagggtaacca

SEQ ID NO: 592 - DNA, 22 bp, Artificial Sequence
  Description of Artificial Sequence: Synthetic oligonucleotide
tacaagagtgagctgtttcagt

SEQ ID NO: 593 - DNA, 22 bp, Artificial Sequence
  Description of Artificial Sequence: Synthetic oligonucleotide
cattacaagagtgagctgtttc

SEQ ID NO: 594 - DNA, 22 bp, Artificial Sequence
  Description of Artificial Sequence: Synthetic oligonucleotide
aacctattactaggttccattg

SEQ ID NO: 595 - DNA, 22 bp, Artificial Sequence
  Description of Artificial Sequence: Synthetic oligonucleotide
atgtggtaccatgtcaccgtct

SEQ ID NO: 596 - DNA, 22 bp, Artificial Sequence
  Description of Artificial Sequence: Synthetic oligonucleotide
tatgtggtaccatgtcaccgtc

SEQ ID NO: 597 - DNA, 22 bp, Artificial Sequence
  Description of Artificial Sequence: Synthetic oligonucleotide
tgtggtaccatgtcaccgtcta

SEQ ID NO: 598 - DNA, 22 bp, Artificial Sequence
  Description of Artificial Sequence: Synthetic oligonucleotide
atatatgtggtaccatgtcacc

SEQ ID NO: 599 - DNA, 22 bp, Artificial Sequence
  Description of Artificial Sequence: Synthetic oligonucleotide
gatatatgtggtaccatgtcac

SEQ ID NO: 600 - DNA, 22 bp, Artificial Sequence
  Description of Artificial Sequence: Synthetic oligonucleotide
atatgtggtaccatgtcaccgt

SEQ ID NO: 601 - DNA, 22 bp, Artificial Sequence
  Description of Artificial Sequence: Synthetic oligonucleotide
tatatgtggtaccatgtcaccg

SEQ ID NO: 602 - DNA, 22 bp, Artificial Sequence
  Description of Artificial Sequence: Synthetic oligonucleotide
tgatatatgtggtaccatgtca

SEQ ID NO: 603 - DNA, 22 bp, Artificial Sequence
  Description of Artificial Sequence: Synthetic oligonucleotide
gtgatatatgtggtaccatgtc

SEQ ID NO: 604 - DNA, 22 bp, Artificial Sequence
  Description of Artificial Sequence: Synthetic oligonucleotide
ttcgtttagagaacagatctac

SEQ ID NO: 605 - DNA, 22 bp, Artificial Sequence
  Description of Artificial Sequence: Synthetic oligonucleotide
acagcattctgtgaattataag

SEQ ID NO: 606 - DNA, 22 bp, Artificial Sequence
  Description of Artificial Sequence: Synthetic oligonucleotide
cagcattctgtgaattataagg

SEQ ID NO: 607 - DNA, 22 bp, Artificial Sequence
  Description of Artificial Sequence: Synthetic oligonucleotide
agcattctgtgaattataaggt

SEQ ID NO: 608 - DNA, 22 bp, Artificial Sequence
  Description of Artificial Sequence: Synthetic oligonucleotide
gcattctgtgaattataaggtg

SEQ ID NO: 609 - DNA, 22 bp, Artificial Sequence
  Description of Artificial Sequence: Synthetic oligonucleotide
gctacagcattctgtgaattat

SEQ ID NO: 610 - DNA, 22 bp, Artificial Sequence
  Description of Artificial Sequence: Synthetic oligonucleotide
ctacagcattctgtgaattata

SEQ ID NO: 611 - DNA, 22 bp, Artificial Sequence
  Description of Artificial Sequence: Synthetic oligonucleotide
tacagcattctgtgaattataa

SEQ ID NO: 612 - DNA, 22 bp, Artificial Sequence
  Description of Artificial Sequence: Synthetic oligonucleotide
taatatttagttcgtttagacc

SEQ ID NO: 613 - DNA, 22 bp, Artificial Sequence
  Description of Artificial Sequence: Synthetic oligonucleotide
aaatcaacatctggtgatgtat

SEQ ID NO: 614 - DNA, 22 bp, Artificial Sequence
  Description of Artificial Sequence: Synthetic oligonucleotide
atcaacatctggtgatgtatga

SEQ ID NO: 615 - DNA, 22 bp, Artificial Sequence
  Description of Artificial Sequence: Synthetic oligonucleotide
aatcaacatctggtgatgtatg

SEQ ID NO: 616 - DNA, 22 bp, Artificial Sequence
  Description of Artificial Sequence: Synthetic oligonucleotide
caacatctggtgatgtatgatt

SEQ ID NO: 617 - DNA, 22 bp, Artificial Sequence
  Description of Artificial Sequence: Synthetic oligonucleotide
tcaacatctggtgatgtatgat

SEQ ID NO: 618 - DNA, 22 bp, Artificial Sequence
  Description of Artificial Sequence: Synthetic oligonucleotide
acatctggtgatgtatgattct

SEQ ID NO: 619 - DNA, 22 bp, Artificial Sequence
  Description of Artificial Sequence: Synthetic oligonucleotide
aacatctggtgatgtatgattc

SEQ ID NO: 620 - DNA, 22 bp, Artificial Sequence
  Description of Artificial Sequence: Synthetic oligonucleotide
agccctgtatacgacatcagta

SEQ ID NO: 621 - DNA, 22 bp, Artificial Sequence
  Description of Artificial Sequence: Synthetic oligonucleotide
aagccctgtatacgacatcagt

SEQ ID NO: 622 - DNA, 22 bp, Artificial Sequence
  Description of Artificial Sequence: Synthetic oligonucleotide
aaagccctgtatacgacatcag

SEQ ID NO: 623 - DNA, 22 bp, Artificial Sequence
  Description of Artificial Sequence: Synthetic oligonucleotide
aaaagccctgtatacgacatca

SEQ ID NO: 624 - DNA, 22 bp, Artificial Sequence
  Description of Artificial Sequence: Synthetic oligonucleotide
ctgtatacgacatcagtactag

SEQ ID NO: 625 - DNA, 22 bp, Artificial Sequence
  Description of Artificial Sequence: Synthetic oligonucleotide
cctgtatacgacatcagtacta

SEQ ID NO: 626 - DNA, 22 bp, Artificial Sequence
  Description of Artificial Sequence: Synthetic oligonucleotide
ccctgtatacgacatcagtact

SEQ ID NO: 627 - DNA, 22 bp, Artificial Sequence
  Description of Artificial Sequence: Synthetic oligonucleotide
gccctgtatacgacatcagtac

SEQ ID NO: 628 - DNA, 22 bp, Artificial Sequence
  Description of Artificial Sequence: Synthetic oligonucleotide
caaaagccctgtatacgacatc

SEQ ID NO: 629 - DNA, 22 bp, Artificial Sequence
  Description of Artificial Sequence: Synthetic oligonucleotide
tcaaaagccctgtatacgacat

SEQ ID NO: 630 - DNA, 22 bp, Artificial Sequence
  Description of Artificial Sequence: Synthetic oligonucleotide
actggtttaatgttgcgcttag

SEQ ID NO: 631 - DNA, 22 bp, Artificial Sequence
  Description of Artificial Sequence: Synthetic oligonucleotide
ctggtttaatgttgcgcttagc

SEQ ID NO: 632 - DNA, 22 bp, Artificial Sequence
  Description of Artificial Sequence: Synthetic oligonucleotide
gcttctggcccagttcctaggt

SEQ ID NO: 633 - DNA, 22 bp, Artificial Sequence
  Description of Artificial Sequence: Synthetic oligonucleotide
cttctggcccagttcctaggta

SEQ ID NO: 634 - DNA, 22 bp, Artificial Sequence
  Description of Artificial Sequence: Synthetic oligonucleotide
agcttctggcccagttcctagg

SEQ ID NO: 635 - DNA, 22 bp, Artificial Sequence
  Description of Artificial Sequence: Synthetic oligonucleotide
ccaattactacagtagctcctc

SEQ ID NO: 636 - DNA, 22 bp, Artificial Sequence
  Description of Artificial Sequence: Synthetic oligonucleotide
tccaattactacagtagctcct

SEQ ID NO: 637 - DNA, 22 bp, Artificial Sequence
  Description of Artificial Sequence: Synthetic oligonucleotide
actacagtagctcctctagtgg

SEQ ID NO: 638 - DNA, 22 bp, Artificial Sequence
  Description of Artificial Sequence: Synthetic oligonucleotide
tactacagtagctcctctagtg

SEQ ID NO: 639 - DNA, 22 bp, Artificial Sequence
  Description of Artificial Sequence: Synthetic oligonucleotide
tacagtagctcctctagtggcg

SEQ ID NO: 640 - DNA, 22 bp, Artificial Sequence
  Description of Artificial Sequence: Synthetic oligonucleotide
ctacagtagctcctctagtggc

SEQ ID NO: 641 - DNA, 22 bp, Artificial Sequence
  Description of Artificial Sequence: Synthetic oligonucleotide
aattactacagtagctcctcta

SEQ ID NO: 642 - DNA, 22 bp, Artificial Sequence
  Description of Artificial Sequence: Synthetic oligonucleotide
caattactacagtagctcctct

SEQ ID NO: 643 - DNA, 22 bp, Artificial Sequence
  Description of Artificial Sequence: Synthetic oligonucleotide
ttactacagtagctcctctagt

SEQ ID NO: 644 - DNA, 22 bp, Artificial Sequence
  Description of Artificial Sequence: Synthetic oligonucleotide
attactacagtagctcctctag

SEQ ID NO: 645 - DNA, 22 bp, Artificial Sequence
  Description of Artificial Sequence: Synthetic oligonucleotide
tagcaaaatgactcttaccagt

SEQ ID NO: 646 - DNA, 22 bp, Artificial Sequence
  Description of Artificial Sequence: Synthetic oligonucleotide
agcaaaatgactcttaccagta

SEQ ID NO: 647 - DNA, 22 bp, Artificial Sequence
  Description of Artificial Sequence: Synthetic oligonucleotide
atagcaaaatgactcttaccag

SEQ ID NO: 648 - DNA, 22 bp, Artificial Sequence
  Description of Artificial Sequence: Synthetic oligonucleotide
acgaaccgttcaatcataagtg

SEQ ID NO: 649 - DNA, 22 bp, Artificial Sequence
  Description of Artificial Sequence: Synthetic oligonucleotide
cgaaccgttcaatcataagtgt

SEQ ID NO: 650 - DNA, 22 bp, Artificial Sequence
  Description of Artificial Sequence: Synthetic oligonucleotide
gaaccgttcaatcataagtgta

SEQ ID NO: 651 - DNA, 22 bp, Artificial Sequence
  Description of Artificial Sequence: Synthetic oligonucleotide
aaccgttcaatcataagtgtac

SEQ ID NO: 652 - DNA, 22 bp, Artificial Sequence
  Description of Artificial Sequence: Synthetic oligonucleotide
gacacgaaccgttcaatcataa

SEQ ID NO: 653 - DNA, 22 bp, Artificial Sequence
  Description of Artificial Sequence: Synthetic oligonucleotide
acacgaaccgttcaatcataag

SEQ ID NO: 654 - DNA, 22 bp, Artificial Sequence
  Description of Artificial Sequence: Synthetic oligonucleotide
cacgaaccgttcaatcataagt

SEQ ID NO: 655 - DNA, 22 bp, Artificial Sequence
  Description of Artificial Sequence: Synthetic oligonucleotide
tcctttagtaaggtcagtctca

SEQ ID NO: 656 - DNA, 22 bp, Artificial Sequence
  Description of Artificial Sequence: Synthetic oligonucleotide
ttagtaaggtcagtctcagtcc

SEQ ID NO: 657 - DNA, 22 bp, Artificial Sequence
  Description of Artificial Sequence: Synthetic oligonucleotide
atagcccatctgccttgtgtgg

SEQ ID NO: 658 - DNA, 22 bp, Artificial Sequence
  Description of Artificial Sequence: Synthetic oligonucleotide
tatagcccatctgccttgtgtg

SEQ ID NO: 659 - DNA, 22 bp, Artificial Sequence
  Description of Artificial Sequence: Synthetic oligonucleotide
gcccatctgccttgtgtggtct

SEQ ID NO: 660 - DNA, 22 bp, Artificial Sequence
  Description of Artificial Sequence: Synthetic oligonucleotide
agcccatctgccttgtgtggtc

SEQ ID NO: 661 - DNA, 22 bp, Artificial Sequence
  Description of Artificial Sequence: Synthetic oligonucleotide
tagcccatctgccttgtgtggt

SEQ ID NO: 662 - DNA, 22 bp, Artificial Sequence
  Description of Artificial Sequence: Synthetic oligonucleotide
tgacttccatgccaatgcgcga

SEQ ID NO: 663 - DNA, 22 bp, Artificial Sequence
  Description of Artificial Sequence: Synthetic oligonucleotide
gtgacttccatgccaatgcgcg

SEQ ID NO: 664 - DNA, 22 bp, Artificial Sequence
  Description of Artificial Sequence: Synthetic oligonucleotide
acttccatgccaatgcgcgaca

SEQ ID NO: 665 - DNA, 22 bp, Artificial Sequence
  Description of Artificial Sequence: Synthetic oligonucleotide
gacttccatgccaatgcgcgac

SEQ ID NO: 666 - DNA, 22 bp, Artificial Sequence
  Description of Artificial Sequence: Synthetic oligonucleotide
ttccatgccaatgcgcgacatt

SEQ ID NO: 667 - DNA, 22 bp, Artificial Sequence
  Description of Artificial Sequence: Synthetic oligonucleotide
cttccatgccaatgcgcgacat

SEQ ID NO: 668 - DNA, 22 bp, Artificial Sequence
  Description of Artificial Sequence: Synthetic oligonucleotide
ccatgccaatgcgcgacattcc

SEQ ID NO: 669 - DNA, 22 bp, Artificial Sequence
  Description of Artificial Sequence: Synthetic oligonucleotide
tccatgccaatgcgcgacattc

SEQ ID NO: 670 - DNA, 22 bp, Artificial Sequence
  Description of Artificial Sequence: Synthetic oligonucleotide
ttctacatcactataaacagtt

SEQ ID NO: 671 - DNA, 22 bp, Artificial Sequence
  Description of Artificial Sequence: Synthetic oligonucleotide
tctacatcactataaacagttt

SEQ ID NO: 672 - DNA, 22 bp, Artificial Sequence
  Description of Artificial Sequence: Synthetic oligonucleotide
taatttataattataatcagca

SEQ ID NO: 673 - DNA, 22 bp, Artificial Sequence
  Description of Artificial Sequence: Synthetic oligonucleotide
gcgactacgtgatgaggaacga

SEQ ID NO: 674 - DNA, 22 bp, Artificial Sequence
  Description of Artificial Sequence: Synthetic oligonucleotide
cgactacgtgatgaggaacgag

SEQ ID NO: 675 - DNA, 22 bp, Artificial Sequence
  Description of Artificial Sequence: Synthetic oligonucleotide
cacggtcaaattcagatttagc

SEQ ID NO: 676 - DNA, 22 bp, Artificial Sequence
  Description of Artificial Sequence: Synthetic oligonucleotide
tcacggtcaaattcagatttag

SEQ ID NO: 677 - DNA, 22 bp, Artificial Sequence
  Description of Artificial Sequence: Synthetic oligonucleotide
cggtcaaattcagatttagcca

SEQ ID NO: 678 - DNA, 22 bp, Artificial Sequence
  Description of Artificial Sequence: Synthetic oligonucleotide
acggtcaaattcagatttagcc

SEQ ID NO: 679 - DNA, 22 bp, Artificial Sequence
  Description of Artificial Sequence: Synthetic oligonucleotide
gtcaaattcagatttagccaca

SEQ ID NO: 680 - DNA, 22 bp, Artificial Sequence
  Description of Artificial Sequence: Synthetic oligonucleotide
ggtcaaattcagatttagccac

SEQ ID NO: 681 - DNA, 22 bp, Artificial Sequence
  Description of Artificial Sequence: Synthetic oligonucleotide
caaattcagatttagccacatt

SEQ ID NO: 682 - DNA, 22 bp, Artificial Sequence
  Description of Artificial Sequence: Synthetic oligonucleotide
tcaaattcagatttagccacat

SEQ ID NO: 683 - DNA, 22 bp, Artificial Sequence
  Description of Artificial Sequence: Synthetic oligonucleotide
gtattattgggtaaaccttggg

SEQ ID NO: 684 - DNA, 22 bp, Artificial Sequence
  Description of Artificial Sequence: Synthetic oligonucleotide
agtattattgggtaaaccttgg

SEQ ID NO: 685 - DNA, 22 bp, Artificial Sequence
  Description of Artificial Sequence: Synthetic oligonucleotide
gttccgaggaacatgtctggac

SEQ ID NO: 686 - DNA, 22 bp, Artificial Sequence
  Description of Artificial Sequence: Synthetic oligonucleotide
agttccgaggaacatgtctgga

SEQ ID NO: 687 - DNA, 22 bp, Artificial Sequence
  Description of Artificial Sequence: Synthetic oligonucleotide
tattgggtaaaccttggggccg

SEQ ID NO: 688 - DNA, 22 bp, Artificial Sequence
  Description of Artificial Sequence: Synthetic oligonucleotide
ttattgggtaaaccttggggcc

SEQ ID NO: 689 - DNA, 22 bp, Artificial Sequence
  Description of Artificial Sequence: Synthetic oligonucleotide
aggaacatgtctggacctatag

SEQ ID NO: 690 - DNA, 22 bp, Artificial Sequence
  Description of Artificial Sequence: Synthetic oligonucleotide
gaacatgtctggacctatagtt

SEQ ID NO: 691 - DNA, 22 bp, Artificial Sequence
  Description of Artificial Sequence: Synthetic oligonucleotide
tccgaggaacatgtctggacct

SEQ ID NO: 692 - DNA, 22 bp, Artificial Sequence
  Description of Artificial Sequence: Synthetic oligonucleotide
ttccgaggaacatgtctggacc

SEQ ID NO: 693 - DNA, 22 bp, Artificial Sequence
  Description of Artificial Sequence: Synthetic oligonucleotide
cgaggaacatgtctggacctat

SEQ ID NO: 694 - DNA, 22 bp, Artificial Sequence
  Description of Artificial Sequence: Synthetic oligonucleotide
ccgaggaacatgtctggaccta

SEQ ID NO: 695 - DNA, 22 bp, Artificial Sequence
  Description of Artificial Sequence: Synthetic oligonucleotide
aaacattaaagtttgcacaatg

SEQ ID NO: 696 - DNA, 22 bp, Artificial Sequence
  Description of Artificial Sequence: Synthetic oligonucleotide
cattaaagtttgcacaatgcag

SEQ ID NO: 697 - DNA, 22 bp, Artificial Sequence
  Description of Artificial Sequence: Synthetic oligonucleotide
acattaaagtttgcacaatgca

SEQ ID NO: 698 - DNA, 22 bp, Artificial Sequence
  Description of Artificial Sequence: Synthetic oligonucleotide
ataaaacattaaagtttgcaca

SEQ ID NO: 699 - DNA, 22 bp, Artificial Sequence
  Description of Artificial Sequence: Synthetic oligonucleotide
aataaaacattaaagtttgcac

SEQ ID NO: 700 - DNA, 22 bp, Artificial Sequence
  Description of Artificial Sequence: Synthetic oligonucleotide
aaaacattaaagtttgcacaat

SEQ ID NO: 701 - DNA, 22 bp, Artificial Sequence
  Description of Artificial Sequence: Synthetic oligonucleotide
tctttgtcatccaatttgatgg

SEQ ID NO: 702 - DNA, 22 bp, Artificial Sequence
  Description of Artificial Sequence: Synthetic oligonucleotide
ctttgtcatccaatttgatggc

SEQ ID NO: 703 - DNA, 22 bp, Artificial Sequence
  Description of Artificial Sequence: Synthetic oligonucleotide
atctttgtcatccaatttgatg

SEQ ID NO: 704 - DNA, 22 bp, Artificial Sequence
  Description of Artificial Sequence: Synthetic oligonucleotide
aagtttacatcctgattatgta

SEQ ID NO: 705 - DNA, 22 bp, Artificial Sequence
  Description of Artificial Sequence: Synthetic oligonucleotide
tttgagtgaatatgacatagtc

SEQ ID NO: 706 - DNA, 22 bp, Artificial Sequence
  Description of Artificial Sequence: Synthetic oligonucleotide
gtttgagtgaatatgacatagt

SEQ ID NO: 707 - DNA, 22 bp, Artificial Sequence
  Description of Artificial Sequence: Synthetic oligonucleotide
tgagtgaatatgacatagtcat

SEQ ID NO: 708 - DNA, 22 bp, Artificial Sequence
  Description of Artificial Sequence: Synthetic oligonucleotide
ttgagtgaatatgacatagtca

SEQ ID NO: 709 - DNA, 22 bp, Artificial Sequence
  Description of Artificial Sequence: Synthetic oligonucleotide
agtgaatatgacatagtcatat

SEQ ID NO: 710 - DNA, 22 bp, Artificial Sequence
  Description of Artificial Sequence: Synthetic oligonucleotide
gagtgaatatgacatagtcata

SEQ ID NO: 711 - DNA, 22 bp, Artificial Sequence
  Description of Artificial Sequence: Synthetic oligonucleotide
tgaatatgacatagtcatattc

SEQ ID NO: 712 - DNA, 22 bp, Artificial Sequence
  Description of Artificial Sequence: Synthetic oligonucleotide
gtgaatatgacatagtcatatt

SEQ ID NO: 713 - DNA, 22 bp, Artificial Sequence
  Description of Artificial Sequence: Synthetic oligonucleotide
taccatacctctatttaggttg

SEQ ID NO: 714 - DNA, 22 bp, Artificial Sequence
  Description of Artificial Sequence: Synthetic oligonucleotide
accatacctctatttaggttgt

SEQ ID NO: 715 - DNA, 22 bp, Artificial Sequence
  Description of Artificial Sequence: Synthetic oligonucleotide
agtaccatacctctatttaggt

SEQ ID NO: 716 - DNA, 22 bp, Artificial Sequence
  Description of Artificial Sequence: Synthetic oligonucleotide
gtaccatacctctatttaggtt

SEQ ID NO: 717 - DNA, 22 bp, Artificial Sequence
  Description of Artificial Sequence: Synthetic oligonucleotide
atacctctatttaggttgttta

SEQ ID NO: 718 - DNA, 22 bp, Artificial Sequence
  Description of Artificial Sequence: Synthetic oligonucleotide
tacctctatttaggttgtttaa

SEQ ID NO: 719 - DNA, 22 bp, Artificial Sequence
  Description of Artificial Sequence: Synthetic oligonucleotide
ccatacctctatttaggttgtt

SEQ ID NO: 720 - DNA, 22 bp, Artificial Sequence
  Description of Artificial Sequence: Synthetic oligonucleotide
catacctctatttaggttgttt

SEQ ID NO: 721 - DNA, 22 bp, Artificial Sequence
  Description of Artificial Sequence: Synthetic oligonucleotide
ttaccgggtttgacagtttgaa

SEQ ID NO: 722 - DNA, 22 bp, Artificial Sequence
  Description of Artificial Sequence: Synthetic oligonucleotide
attaccgggtttgacagtttga

SEQ ID NO: 723 - DNA, 22 bp, Artificial Sequence
  Description of Artificial Sequence: Synthetic oligonucleotide
ggtttgacagtttgaaaagcaa

SEQ ID NO: 724 - DNA, 22 bp, Artificial Sequence
  Description of Artificial Sequence: Synthetic oligonucleotide
tttgacagtttgaaaagcaaca

SEQ ID NO: 725 - DNA, 22 bp, Artificial Sequence
  Description of Artificial Sequence: Synthetic oligonucleotide
gtttgacagtttgaaaagcaac

SEQ ID NO: 726 - DNA, 22 bp, Artificial Sequence
  Description of Artificial Sequence: Synthetic oligonucleotide
accgggtttgacagtttgaaaa

SEQ ID NO: 727 - DNA, 22 bp, Artificial Sequence
  Description of Artificial Sequence: Synthetic oligonucleotide
taccgggtttgacagtttgaaa

SEQ ID NO: 728 - DNA, 22 bp, Artificial Sequence
  Description of Artificial Sequence: Synthetic oligonucleotide
ccgggtttgacagtttgaaaag

SEQ ID NO: 729 - DNA, 22 bp, Artificial Sequence
  Description of Artificial Sequence: Synthetic oligonucleotide
aataagccatccgaaagggagt

SEQ ID NO: 730 - DNA, 22 bp, Artificial Sequence
  Description of Artificial Sequence: Synthetic oligonucleotide
ataagccatccgaaagggagtg

SEQ ID NO: 731 - DNA, 22 bp, Artificial Sequence
  Description of Artificial Sequence: Synthetic oligonucleotide
ccaaaattggagctaagttgtt

SEQ ID NO: 732 - DNA, 22 bp, Artificial Sequence
  Description of Artificial Sequence: Synthetic oligonucleotide
accaaaattggagctaagttgt

SEQ ID NO: 733 - DNA, 22 bp, Artificial Sequence
  Description of Artificial Sequence: Synthetic oligonucleotide
tggagctaagttgtttaacaag

SEQ ID NO: 734 - DNA, 22 bp, Artificial Sequence
  Description of Artificial Sequence: Synthetic oligonucleotide
ttggagctaagttgtttaacaa

SEQ ID NO: 735 - DNA, 22 bp, Artificial Sequence
  Description of Artificial Sequence: Synthetic oligonucleotide
attggagctaagttgtttaaca

SEQ ID NO: 736 - DNA, 22 bp, Artificial Sequence
  Description of Artificial Sequence: Synthetic oligonucleotide
aattggagctaagttgtttaac

SEQ ID NO: 737 - DNA, 22 bp, Artificial Sequence
  Description of Artificial Sequence: Synthetic oligonucleotide
aaattggagctaagttgtttaa

SEQ ID NO: 738 - DNA, 22 bp, Artificial Sequence
  Description of Artificial Sequence: Synthetic oligonucleotide
aaaattggagctaagttgttta

SEQ ID NO: 739 - DNA, 22 bp, Artificial Sequence
  Description of Artificial Sequence: Synthetic oligonucleotide
caaaattggagctaagttgttt

SEQ ID NO: 740 - DNA, 22 bp, Artificial Sequence
  Description of Artificial Sequence: Synthetic oligonucleotide
ttaacaatattgcagcagtacg

SEQ ID NO: 741 - DNA, 22 bp, Artificial Sequence
  Description of Artificial Sequence: Synthetic oligonucleotide
taacaatattgcagcagtacgc

SEQ ID NO: 742 - DNA, 22 bp, Artificial Sequence
  Description of Artificial Sequence: Synthetic oligonucleotide
gactcacgttaacaatattgca

SEQ ID NO: 743 - DNA, 22 bp, Artificial Sequence
  Description of Artificial Sequence: Synthetic oligonucleotide
actcacgttaacaatattgcag

SEQ ID NO: 744 - DNA, 22 bp, Artificial Sequence
  Description of Artificial Sequence: Synthetic oligonucleotide
atcacggtcaaattcagattta

SEQ ID NO: 745 - DNA, 22 bp, Artificial Sequence
  Description of Artificial Sequence: Synthetic oligonucleotide
catcacggtcaaattcagattt

SEQ ID NO: 746 - DNA, 22 bp, Artificial Sequence
  Description of Artificial Sequence: Synthetic oligonucleotide
ggctaaaaagcacaaatagaag

SEQ ID NO: 747 - DNA, 22 bp, Artificial Sequence
  Description of Artificial Sequence: Synthetic oligonucleotide
gctaaaaagcacaaatagaagt

SEQ ID NO: 748 - DNA, 22 bp, Artificial Sequence
  Description of Artificial Sequence: Synthetic oligonucleotide
ctaaaaagcacaaatagaagtc

SEQ ID NO: 749 - DNA, 22 bp, Artificial Sequence
  Description of Artificial Sequence: Synthetic oligonucleotide
taaaaagcacaaatagaagtca

SEQ ID NO: 750 - DNA, 22 bp, Artificial Sequence
  Description of Artificial Sequence: Synthetic oligonucleotide
aaaaagcacaaatagaagtcaa

SEQ ID NO: 751 - DNA, 22 bp, Artificial Sequence
  Description of Artificial Sequence: Synthetic oligonucleotide
aaaagcacaaatagaagtcaat

SEQ ID NO: 752 - DNA, 22 bp, Artificial Sequence
  Description of Artificial Sequence: Synthetic oligonucleotide
aaagcacaaatagaagtcaatt

SEQ ID NO: 753 - DNA, 22 bp, Artificial Sequence
  Description of Artificial Sequence: Synthetic oligonucleotide
aagcacaaatagaagtcaatta

SEQ ID NO: 754 - DNA, 22 bp, Artificial Sequence
  Description of Artificial Sequence: Synthetic oligonucleotide
aaggctaaaaagcacaaataga

SEQ ID NO: 755 - DNA, 22 bp, Artificial Sequence
  Description of Artificial Sequence: Synthetic oligonucleotide
aggctaaaaagcacaaatagaa

SEQ ID NO: 756 - DNA, 22 bp, Artificial Sequence
  Description of Artificial Sequence: Synthetic oligonucleotide
aggattgcgggtgccaatgtga

SEQ ID NO: 757 - DNA, 22 bp, Artificial Sequence
  Description of Artificial Sequence: Synthetic oligonucleotide
ggattgcgggtgccaatgtgat

SEQ ID NO: 758 - DNA, 22 bp, Artificial Sequence
  Description of Artificial Sequence: Synthetic oligonucleotide
caggattgcgggtgccaatgtg

SEQ ID NO: 759 - DNA, 22 bp, Artificial Sequence
  Description of Artificial Sequence: Synthetic oligonucleotide
ttgcgggtgccaatgtgatctt

SEQ ID NO: 760 - DNA, 22 bp, Artificial Sequence
  Description of Artificial Sequence: Synthetic oligonucleotide
tgcgggtgccaatgtgatcttt

SEQ ID NO: 761 - DNA, 22 bp, Artificial Sequence
  Description of Artificial Sequence: Synthetic oligonucleotide
gattgcgggtgccaatgtgatc

SEQ ID NO: 762 - DNA, 22 bp, Artificial Sequence
  Description of Artificial Sequence: Synthetic oligonucleotide
attgcgggtgccaatgtgatct

SEQ ID NO: 763 - DNA, 22 bp, Artificial Sequence
  Description of Artificial Sequence: Synthetic oligonucleotide
gtaattctaacatagtgctctt

SEQ ID NO: 764 - DNA, 22 bp, Artificial Sequence
  Description of Artificial Sequence: Synthetic oligonucleotide
taattctaacatagtgctcttg

SEQ ID NO: 765 - DNA, 22 bp, Artificial Sequence
  Description of Artificial Sequence: Synthetic oligonucleotide
ttctaacatagtgctcttgtgg

SEQ ID NO: 766 - DNA, 22 bp, Artificial Sequence
  Description of Artificial Sequence: Synthetic oligonucleotide
tctaacatagtgctcttgtggc

SEQ ID NO: 767 - DNA, 22 bp, Artificial Sequence
  Description of Artificial Sequence: Synthetic oligonucleotide
aattctaacatagtgctcttgt

SEQ ID NO: 768 - DNA, 22 bp, Artificial Sequence
  Description of Artificial Sequence: Synthetic oligonucleotide
attctaacatagtgctcttgtg

SEQ ID NO: 769 - DNA, 22 bp, Artificial Sequence
  Description of Artificial Sequence: Synthetic oligonucleotide
aacatagtgctcttgtggcact

SEQ ID NO: 770 - DNA, 22 bp, Artificial Sequence
  Description of Artificial Sequence: Synthetic oligonucleotide
acatagtgctcttgtggcacta

SEQ ID NO: 771 - DNA, 22 bp, Artificial Sequence
  Description of Artificial Sequence: Synthetic oligonucleotide
ctaacatagtgctcttgtggca

SEQ ID NO: 772 - DNA, 22 bp, Artificial Sequence
  Description of Artificial Sequence: Synthetic oligonucleotide
taacatagtgctcttgtggcac

SEQ ID NO: 773 - DNA, 22 bp, Artificial Sequence
  Description of Artificial Sequence: Synthetic oligonucleotide
tcctcagtagctttgagcgttt

SEQ ID NO: 774 - DNA, 22 bp, Artificial Sequence
  Description of Artificial Sequence: Synthetic oligonucleotide
cctcagtagctttgagcgtttc

SEQ ID NO: 775 - DNA, 22 bp, Artificial Sequence
  Description of Artificial Sequence: Synthetic oligonucleotide
ctcagtagctttgagcgtttct

SEQ ID NO: 776 - DNA, 22 bp, Artificial Sequence
  Description of Artificial Sequence: Synthetic oligonucleotide
tcagtagctttgagcgtttctg

SEQ ID NO: 777 - DNA, 22 bp, Artificial Sequence
  Description of Artificial Sequence: Synthetic oligonucleotide
cagtagctttgagcgtttctgc

SEQ ID NO: 778 - DNA, 22 bp, Artificial Sequence
  Description of Artificial Sequence: Synthetic oligonucleotide
agtagctttgagcgtttctgct

SEQ ID NO: 779 - DNA, 22 bp, Artificial Sequence
  Description of Artificial Sequence: Synthetic oligonucleotide
gtagctttgagcgtttctgctg

SEQ ID NO: 780 - DNA, 22 bp, Artificial Sequence
  Description of Artificial Sequence: Synthetic oligonucleotide
tagctttgagcgtttctgctgc

SEQ ID NO: 781 - DNA, 22 bp, Artificial Sequence
  Description of Artificial Sequence: Synthetic oligonucleotide
taacacctgtagaaaaacctag

SEQ ID NO: 782 - DNA, 22 bp, Artificial Sequence
  Description of Artificial Sequence: Synthetic oligonucleotide
ttaacacctgtagaaaaaccta

SEQ ID NO: 783 - DNA, 22 bp, Artificial Sequence
  Description of Artificial Sequence: Synthetic oligonucleotide
acacctgtagaaaaacctagct

SEQ ID NO: 784 - DNA, 22 bp, Artificial Sequence
  Description of Artificial Sequence: Synthetic oligonucleotide
aacacctgtagaaaaacctagc

SEQ ID NO: 785 - DNA, 22 bp, Artificial Sequence
  Description of Artificial Sequence: Synthetic oligonucleotide
cacctgtagaaaaacctagctg

SEQ ID NO: 786 - DNA, 22 bp, Artificial Sequence
  Description of Artificial Sequence: Synthetic oligonucleotide
ctacaaggtggttccagttctg

SEQ ID NO: 787 - DNA, 22 bp, Artificial Sequence
  Description of Artificial Sequence: Synthetic oligonucleotide
cctacaaggtggttccagttct

SEQ ID NO: 788 - DNA, 22 bp, Artificial Sequence
  Description of Artificial Sequence: Synthetic oligonucleotide
acctacaaggtggttccagttc

SEQ ID NO: 789 - DNA, 22 bp, Artificial Sequence
  Description of Artificial Sequence: Synthetic oligonucleotide
aacctacaaggtggttccagtt

SEQ ID NO: 790 - DNA, 22 bp, Artificial Sequence
  Description of Artificial Sequence: Synthetic oligonucleotide
aaacctacaaggtggttccagt

SEQ ID NO: 791 - DNA, 22 bp, Artificial Sequence
  Description of Artificial Sequence: Synthetic oligonucleotide
caaacctacaaggtggttccag

SEQ ID NO: 792 - DNA, 22 bp, Artificial Sequence
  Description of Artificial Sequence: Synthetic oligonucleotide
acaaacctacaaggtggttcca

SEQ ID NO: 793 - DNA, 22 bp, Artificial Sequence
  Description of Artificial Sequence: Synthetic oligonucleotide
aacaaacctacaaggtggttcc

SEQ ID NO: 794 - DNA, 22 bp, Artificial Sequence
  Description of Artificial Sequence: Synthetic oligonucleotide
taacaaacctacaaggtggttc

SEQ ID NO: 795 - DNA, 22 bp, Artificial Sequence
  Description of Artificial Sequence: Synthetic oligonucleotide
gtaacaaacctacaaggtggtt

SEQ ID NO: 796 - DNA, 22 bp, Artificial Sequence
  Description of Artificial Sequence: Synthetic oligonucleotide
acaaaagttagcagcttcacca

SEQ ID NO: 797 - DNA, 22 bp, Artificial Sequence
  Description of Artificial Sequence: Synthetic oligonucleotide
caaaagttagcagcttcaccag

SEQ ID NO: 798 - DNA, 22 bp, Artificial Sequence
  Description of Artificial Sequence: Synthetic oligonucleotide
agccaaatgtaccatggccatt

SEQ ID NO: 799 - DNA, 22 bp, Artificial Sequence
  Description of Artificial Sequence: Synthetic oligonucleotide
gccaaatgtaccatggccattt

SEQ ID NO: 800 - DNA, 22 bp, Artificial Sequence
  Description of Artificial Sequence: Synthetic oligonucleotide
gatggatctgggtaaggaaggt

SEQ ID NO: 801 - DNA, 22 bp, Artificial Sequence
  Description of Artificial Sequence: Synthetic oligonucleotide
tgatggatctgggtaaggaagg

SEQ ID NO: 802 - DNA, 22 bp, Artificial Sequence
  Description of Artificial Sequence: Synthetic oligonucleotide
gatctgggtaaggaaggtacac

SEQ ID NO: 803 - DNA, 22 bp, Artificial Sequence
  Description of Artificial Sequence: Synthetic oligonucleotide
ggatctgggtaaggaaggtaca

SEQ ID NO: 804 - DNA, 22 bp, Artificial Sequence
  Description of Artificial Sequence: Synthetic oligonucleotide
tggatctgggtaaggaaggtac

SEQ ID NO: 805 - DNA, 22 bp, Artificial Sequence
  Description of Artificial Sequence: Synthetic oligonucleotide
atggatctgggtaaggaaggta

SEQ ID NO: 806 - DNA, 22 bp, Artificial Sequence
  Description of Artificial Sequence: Synthetic oligonucleotide
caaatgaatctgcatagacatt

SEQ ID NO: 807 - DNA, 22 bp, Artificial Sequence
  Description of Artificial Sequence: Synthetic oligonucleotide
tacaaatgaatctgcatagaca

SEQ ID NO: 808 - DNA, 22 bp, Artificial Sequence
  Description of Artificial Sequence: Synthetic oligonucleotide
acaaatgaatctgcatagacat

SEQ ID NO: 809 - DNA, 22 bp, Artificial Sequence
  Description of Artificial Sequence: Synthetic oligonucleotide
tacttctagtaaaagtacacaa

SEQ ID NO: 810 - DNA, 22 bp, Artificial Sequence
  Description of Artificial Sequence: Synthetic oligonucleotide
gtacttctagtaaaagtacaca

SEQ ID NO: 811 - DNA, 22 bp, Artificial Sequence
  Description of Artificial Sequence: Synthetic oligonucleotide
ttctagtaaaagtacacaattg

SEQ ID NO: 812 - DNA, 22 bp, Artificial Sequence
  Description of Artificial Sequence: Synthetic oligonucleotide
cttctagtaaaagtacacaatt

SEQ ID NO: 813 - DNA, 22 bp, Artificial Sequence
  Description of Artificial Sequence: Synthetic oligonucleotide
acttctagtaaaagtacacaat

SEQ ID NO: 814 - DNA, 22 bp, Artificial Sequence
  Description of Artificial Sequence: Synthetic oligonucleotide
tgagagcggtgaaccaagacgc

SEQ ID NO: 815 - DNA, 22 bp, Artificial Sequence
  Description of Artificial Sequence: Synthetic oligonucleotide
agagcggtgaaccaagacgcag

SEQ ID NO: 816 - DNA, 22 bp, Artificial Sequence
  Description of Artificial Sequence: Synthetic oligonucleotide
tggtatgtctgatcccaatatt

SEQ ID NO: 817 - DNA, 22 bp, Artificial Sequence
  Description of Artificial Sequence: Synthetic oligonucleotide
ggtatgtctgatcccaatattt

SEQ ID NO: 818 - DNA, 22 bp, Artificial Sequence
  Description of Artificial Sequence: Synthetic oligonucleotide
ataaaactcaggttcccaatac

SEQ ID NO: 819 - DNA, 22 bp, Artificial Sequence
  Description of Artificial Sequence: Synthetic oligonucleotide
cataaaactcaggttcccaata

SEQ ID NO: 820 - DNA, 22 bp, Artificial Sequence
  Description of Artificial Sequence: Synthetic oligonucleotide
tattggtgttaattggaacgcc

SEQ ID NO: 821 - DNA, 22 bp, Artificial Sequence
  Description of Artificial Sequence: Synthetic oligonucleotide
ctattggtgttaattggaacgc

SEQ ID NO: 822 - DNA, 22 bp, Artificial Sequence
  Description of Artificial Sequence: Synthetic oligonucleotide
gattcatttgagttatagtagg

SEQ ID NO: 823 - DNA, 22 bp, Artificial Sequence
  Description of Artificial Sequence: Synthetic oligonucleotide
attcatttgagttatagtaggg

SEQ ID NO: 824 - DNA, 22 bp, Artificial Sequence
  Description of Artificial Sequence: Synthetic oligonucleotide
catttgagttatagtagggatg

SEQ ID NO: 825 - DNA, 22 bp, Artificial Sequence
  Description of Artificial Sequence: Synthetic oligonucleotide
atttgagttatagtagggatga

SEQ ID NO: 826 - DNA, 22 bp, Artificial Sequence
  Description of Artificial Sequence: Synthetic oligonucleotide
ttcatttgagttatagtaggga

SEQ ID NO: 827 - DNA, 22 bp, Artificial Sequence
  Description of Artificial Sequence: Synthetic oligonucleotide
tcatttgagttatagtagggat

SEQ ID NO: 828 - DNA, 22 bp, Artificial Sequence
  Description of Artificial Sequence: Synthetic oligonucleotide
tgagttatagtagggatgacat

SEQ ID NO: 829 - DNA, 22 bp, Artificial Sequence
  Description of Artificial Sequence: Synthetic oligonucleotide
gagttatagtagggatgacatt

SEQ ID NO: 830 - DNA, 22 bp, Artificial Sequence
  Description of Artificial Sequence: Synthetic oligonucleotide
tttgagttatagtagggatgac

SEQ ID NO: 831 - DNA, 22 bp, Artificial Sequence
  Description of Artificial Sequence: Synthetic oligonucleotide
ttgagttatagtagggatgaca

SEQ ID NO: 832 - DNA, 22 bp, Artificial Sequence
  Description of Artificial Sequence: Synthetic oligonucleotide
ggaacatgtctggacctatagt

SEQ ID NO: 833 - DNA, 22 bp, Artificial Sequence
  Description of Artificial Sequence: Synthetic oligonucleotide
cattaccatcctgagcaaagaa

SEQ ID NO: 834 - DNA, 22 bp, Artificial Sequence
  Description of Artificial Sequence: Synthetic oligonucleotide
gcattaccatcctgagcaaaga

SEQ ID NO: 835 - DNA, 22 bp, Artificial Sequence
  Description of Artificial Sequence: Synthetic oligonucleotide
tcaggttgcaaaggatcataaa

SEQ ID NO: 836 - DNA, 22 bp, Artificial Sequence
  Description of Artificial Sequence: Synthetic oligonucleotide
tgattaaagattgctatgtgag

SEQ ID NO: 837 - DNA, 22 bp, Artificial Sequence
  Description of Artificial Sequence: Synthetic oligonucleotide
gattaaagattgctatgtgaga

SEQ ID NO: 838 - DNA, 22 bp, Artificial Sequence
  Description of Artificial Sequence: Synthetic oligonucleotide
aagattgctatgtgagattaaa

SEQ ID NO: 839 - DNA, 22 bp, Artificial Sequence
  Description of Artificial Sequence: Synthetic oligonucleotide
agattgctatgtgagattaaag

SEQ ID NO: 840 - DNA, 22 bp, Artificial Sequence
  Description of Artificial Sequence: Synthetic oligonucleotide
gattgctatgtgagattaaagt

SEQ ID NO: 841 - DNA, 22 bp, Artificial Sequence
  Description of Artificial Sequence: Synthetic oligonucleotide
attgctatgtgagattaaagtt

SEQ ID NO: 842 - DNA, 22 bp, Artificial Sequence
  Description of Artificial Sequence: Synthetic oligonucleotide
attaaagattgctatgtgagat

SEQ ID NO: 843 - DNA, 22 bp, Artificial Sequence
  Description of Artificial Sequence: Synthetic oligonucleotide
ttaaagattgctatgtgagatt

SEQ ID NO: 844 - DNA, 22 bp, Artificial Sequence
  Description of Artificial Sequence: Synthetic oligonucleotide
taaagattgctatgtgagatta

SEQ ID NO: 845 - DNA, 22 bp, Artificial Sequence
  Description of Artificial Sequence: Synthetic oligonucleotide
aaagattgctatgtgagattaa

SEQ ID NO: 846 - DNA, 22 bp, Artificial Sequence
  Description of Artificial Sequence: Synthetic oligonucleotide
attcaacagaacttccttcctt

SEQ ID NO: 847 - DNA, 22 bp, Artificial Sequence
  Description of Artificial Sequence: Synthetic oligonucleotide
aattcaacagaacttccttcct

SEQ ID NO: 848 - DNA, 22 bp, Artificial Sequence
  Description of Artificial Sequence: Synthetic oligonucleotide
ttcaacagaacttccttcctta

SEQ ID NO: 849 - DNA, 22 bp, Artificial Sequence
  Description of Artificial Sequence: Synthetic oligonucleotide
aacagaacttccttccttaaag

SEQ ID NO: 850 - DNA, 22 bp, Artificial Sequence
  Description of Artificial Sequence: Synthetic oligonucleotide
caacagaacttccttccttaaa

SEQ ID NO: 851 - DNA, 22 bp, Artificial Sequence
  Description of Artificial Sequence: Synthetic oligonucleotide
cagaacttccttccttaaagaa

SEQ ID NO: 852 - DNA, 22 bp, Artificial Sequence
  Description of Artificial Sequence: Synthetic oligonucleotide
acagaacttccttccttaaaga

SEQ ID NO: 853 - DNA, 22 bp, Artificial Sequence
  Description of Artificial Sequence: Synthetic oligonucleotide
taattcaacagaacttccttcc

SEQ ID NO: 854 - DNA, 22 bp, Artificial Sequence
  Description of Artificial Sequence: Synthetic oligonucleotide
ttaattcaacagaacttccttc

SEQ ID NO: 855 - DNA, 22 bp, Artificial Sequence
  Description of Artificial Sequence: Synthetic oligonucleotide
cgtcaggacaagcaaaagcaaa

SEQ ID NO: 856 - DNA, 22 bp, Artificial Sequence
  Description of Artificial Sequence: Synthetic oligonucleotide
ccgtcaggacaagcaaaagcaa

SEQ ID NO: 857 - DNA, 22 bp, Artificial Sequence
  Description of Artificial Sequence: Synthetic oligonucleotide
ggtttaacatatagtgaaccgc

SEQ ID NO: 858 - DNA, 22 bp, Artificial Sequence
  Description of Artificial Sequence: Synthetic oligonucleotide
tggtttaacatatagtgaaccg

SEQ ID NO: 859 - DNA, 22 bp, Artificial Sequence
  Description of Artificial Sequence: Synthetic oligonucleotide
catatagtgaaccgccacacat

SEQ ID NO: 860 - DNA, 22 bp, Artificial Sequence
  Description of Artificial Sequence: Synthetic oligonucleotide
acatatagtgaaccgccacaca

SEQ ID NO: 861 - DNA, 22 bp, Artificial Sequence
  Description of Artificial Sequence: Synthetic oligonucleotide
aacatatagtgaaccgccacac

SEQ ID NO: 862 - DNA, 22 bp, Artificial Sequence
  Description of Artificial Sequence: Synthetic oligonucleotide
taacatatagtgaaccgccaca

SEQ ID NO: 863 - DNA, 22 bp, Artificial Sequence
  Description of Artificial Sequence: Synthetic oligonucleotide
ttaacatatagtgaaccgccac

SEQ ID NO: 864 - DNA, 22 bp, Artificial Sequence
  Description of Artificial Sequence: Synthetic oligonucleotide
tttaacatatagtgaaccgcca

SEQ ID NO: 865 - DNA, 22 bp, Artificial Sequence
  Description of Artificial Sequence: Synthetic oligonucleotide
gtttaacatatagtgaaccgcc

SEQ ID NO: 866 - DNA, 22 bp, Artificial Sequence
  Description of Artificial Sequence: Synthetic oligonucleotide
aacattgttcgtttagttgtta

SEQ ID NO: 867 - DNA, 22 bp, Artificial Sequence
  Description of Artificial Sequence: Synthetic oligonucleotide
aaacattgttcgtttagttgtt

SEQ ID NO: 868 - DNA, 22 bp, Artificial Sequence
  Description of Artificial Sequence: Synthetic oligonucleotide
tactacatttatctataggcaa

SEQ ID NO: 869 - DNA, 22 bp, Artificial Sequence
  Description of Artificial Sequence: Synthetic oligonucleotide
actacatttatctataggcaaa

SEQ ID NO: 870 - DNA, 22 bp, Artificial Sequence
  Description of Artificial Sequence: Synthetic oligonucleotide
atttatctataggcaaatattt

SEQ ID NO: 871 - DNA, 22 bp, Artificial Sequence
  Description of Artificial Sequence: Synthetic oligonucleotide
acatttatctataggcaaatat

SEQ ID NO: 872 - DNA, 22 bp, Artificial Sequence
  Description of Artificial Sequence: Synthetic oligonucleotide
ctacatttatctataggcaaat

SEQ ID NO: 873 - DNA, 22 bp, Artificial Sequence
  Description of Artificial Sequence: Synthetic oligonucleotide
gcattgtctgcatagcactagt

SEQ ID NO: 874 - DNA, 22 bp, Artificial Sequence
  Description of Artificial Sequence: Synthetic oligonucleotide
agcattgtctgcatagcactag

SEQ ID NO: 875 - DNA, 22 bp, Artificial Sequence
  Description of Artificial Sequence: Synthetic oligonucleotide
atgtcataatacgcatcaccca

SEQ ID NO: 876 - DNA, 22 bp, Artificial Sequence
  Description of Artificial Sequence: Synthetic oligonucleotide
cgctattaactattaacgtacc

SEQ ID NO: 877 - DNA, 22 bp, Artificial Sequence
  Description of Artificial Sequence: Synthetic oligonucleotide
gctattaactattaacgtacct

SEQ ID NO: 878 - DNA, 22 bp, Artificial Sequence
  Description of Artificial Sequence: Synthetic oligonucleotide
taactattaacgtacctgtctc

SEQ ID NO: 879 - DNA, 22 bp, Artificial Sequence
  Description of Artificial Sequence: Synthetic oligonucleotide
aactattaacgtacctgtctct

SEQ ID NO: 880 - DNA, 22 bp, Artificial Sequence
  Description of Artificial Sequence: Synthetic oligonucleotide
actattaacgtacctgtctctt

SEQ ID NO: 881 - DNA, 22 bp, Artificial Sequence
  Description of Artificial Sequence: Synthetic oligonucleotide
ctattaacgtacctgtctcttc

SEQ ID NO: 882 - DNA, 22 bp, Artificial Sequence
  Description of Artificial Sequence: Synthetic oligonucleotide
ctattaactattaacgtacctg

SEQ ID NO: 883 - DNA, 22 bp, Artificial Sequence
  Description of Artificial Sequence: Synthetic oligonucleotide
tattaactattaacgtacctgt

SEQ ID NO: 884 - DNA, 22 bp, Artificial Sequence
  Description of Artificial Sequence: Synthetic oligonucleotide
attaactattaacgtacctgtc

SEQ ID NO: 885 - DNA, 22 bp, Artificial Sequence
  Description of Artificial Sequence: Synthetic oligonucleotide
ttaactattaacgtacctgtct

SEQ ID NO: 886 - DNA, 22 bp, Artificial Sequence
  Description of Artificial Sequence: Synthetic oligonucleotide
atgaggaacgagaagaggcttg

SEQ ID NO: 887 - DNA, 22 bp, Artificial Sequence
  Description of Artificial Sequence: Synthetic oligonucleotide
gatgaggaacgagaagaggctt

SEQ ID NO: 888 - DNA, 22 bp, Artificial Sequence
  Description of Artificial Sequence: Synthetic oligonucleotide
tgatgaggaacgagaagaggct

SEQ ID NO: 889 - DNA, 22 bp, Artificial Sequence
  Description of Artificial Sequence: Synthetic oligonucleotide
gtgatgaggaacgagaagaggc

SEQ ID NO: 890 - DNA, 22 bp, Artificial Sequence
  Description of Artificial Sequence: Synthetic oligonucleotide
cgtgatgaggaacgagaagagg

SEQ ID NO: 891 - DNA, 22 bp, Artificial Sequence
  Description of Artificial Sequence: Synthetic oligonucleotide
acgtgatgaggaacgagaagag

SEQ ID NO: 892 - DNA, 22 bp, Artificial Sequence
  Description of Artificial Sequence: Synthetic oligonucleotide
tacgtgatgaggaacgagaaga

SEQ ID NO: 893 - DNA, 22 bp, Artificial Sequence
  Description of Artificial Sequence: Synthetic oligonucleotide
ctacgtgatgaggaacgagaag

SEQ ID NO: 894 - DNA, 22 bp, Artificial Sequence
  Description of Artificial Sequence: Synthetic oligonucleotide
actacgtgatgaggaacgagaa

SEQ ID NO: 895 - DNA, 22 bp, Artificial Sequence
  Description of Artificial Sequence: Synthetic oligonucleotide
gactacgtgatgaggaacgaga

SEQ ID NO: 896 - DNA, 22 bp, Artificial Sequence
  Description of Artificial Sequence: Synthetic oligonucleotide
tttgttctggaccacgtctgcc

SEQ ID NO: 897 - DNA, 22 bp, Artificial Sequence
  Description of Artificial Sequence: Synthetic oligonucleotide
aaagatcagcattccaagaatg

SEQ ID NO: 898 - DNA, 22 bp, Artificial Sequence
  Description of Artificial Sequence: Synthetic oligonucleotide
atgactaaaatctccataaacg

SEQ ID NO: 899 - DNA, 22 bp, Artificial Sequence
  Description of Artificial Sequence: Synthetic oligonucleotide
gactaaaatctccataaacgat

SEQ ID NO: 900 - DNA, 22 bp, Artificial Sequence
  Description of Artificial Sequence: Synthetic oligonucleotide
tgactaaaatctccataaacga

SEQ ID NO: 901 - DNA, 22 bp, Artificial Sequence
  Description of Artificial Sequence: Synthetic oligonucleotide
aatctccataaacgatatgttc

SEQ ID NO: 902 - DNA, 22 bp, Artificial Sequence
  Description of Artificial Sequence: Synthetic oligonucleotide
aaatctccataaacgatatgtt

SEQ ID NO: 903 - DNA, 22 bp, Artificial Sequence
  Description of Artificial Sequence: Synthetic oligonucleotide
attaaatggaaaaccagctgat

SEQ ID NO: 904 - DNA, 22 bp, Artificial Sequence
  Description of Artificial Sequence: Synthetic oligonucleotide
ttaaatggaaaaccagctgatt

SEQ ID NO: 905 - DNA, 22 bp, Artificial Sequence
  Description of Artificial Sequence: Synthetic oligonucleotide
taaatggaaaaccagctgattt

SEQ ID NO: 906 - DNA, 22 bp, Artificial Sequence
  Description of Artificial Sequence: Synthetic oligonucleotide
taagatctgaatcgacaagcag

SEQ ID NO: 907 - DNA, 22 bp, Artificial Sequence
  Description of Artificial Sequence: Synthetic oligonucleotide
tacatagcctcataaaactcag

SEQ ID NO: 908 - DNA, 22 bp, Artificial Sequence
  Description of Artificial Sequence: Synthetic oligonucleotide
gtacatagcctcataaaactca

SEQ ID NO: 909 - DNA, 22 bp, Artificial Sequence
  Description of Artificial Sequence: Synthetic oligonucleotide
catagcctcataaaactcaggt

SEQ ID NO: 910 - DNA, 22 bp, Artificial Sequence
  Description of Artificial Sequence: Synthetic oligonucleotide
acatagcctcataaaactcagg

SEQ ID NO: 911 - DNA, 22 bp, Artificial Sequence
  Description of Artificial Sequence: Synthetic oligonucleotide
tagcctcataaaactcaggttc

SEQ ID NO: 912 - DNA, 22 bp, Artificial Sequence
  Description of Artificial Sequence: Synthetic oligonucleotide
atagcctcataaaactcaggtt

SEQ ID NO: 913 - DNA, 22 bp, Artificial Sequence
  Description of Artificial Sequence: Synthetic oligonucleotide
gcctcataaaactcaggttccc

SEQ ID NO: 914 - DNA, 22 bp, Artificial Sequence
  Description of Artificial Sequence: Synthetic oligonucleotide
ctcataaaactcaggttcccaa

SEQ ID NO: 915 - DNA, 22 bp, Artificial Sequence
  Description of Artificial Sequence: Synthetic oligonucleotide
cctcataaaactcaggttccca

SEQ ID NO: 916 - DNA, 22 bp, Artificial Sequence
  Description of Artificial Sequence: Synthetic oligonucleotide
ttacacattagggctcttccat

SEQ ID NO: 917 - DNA, 22 bp, Artificial Sequence
  Description of Artificial Sequence: Synthetic oligonucleotide
tttacacattagggctcttcca

SEQ ID NO: 918 - DNA, 22 bp, Artificial Sequence
  Description of Artificial Sequence: Synthetic oligonucleotide
acacattagggctcttccatat

SEQ ID NO: 919 - DNA, 22 bp, Artificial Sequence
  Description of Artificial Sequence: Synthetic oligonucleotide
tacacattagggctcttccata

SEQ ID NO: 920 - DNA, 22 bp, Artificial Sequence
  Description of Artificial Sequence: Synthetic oligonucleotide
ataagttcgtttatgtgtaatg

SEQ ID NO: 921 - DNA, 22 bp, Artificial Sequence
  Description of Artificial Sequence: Synthetic oligonucleotide
cataagttcgtttatgtgtaat

SEQ ID NO: 922 - DNA, 22 bp, Artificial Sequence
  Description of Artificial Sequence: Synthetic oligonucleotide
aagttcgtttatgtgtaatgta

SEQ ID NO: 923 - DNA, 22 bp, Artificial Sequence
  Description of Artificial Sequence: Synthetic oligonucleotide
taagttcgtttatgtgtaatgt

SEQ ID NO: 924 - DNA, 22 bp, Artificial Sequence
  Description of Artificial Sequence: Synthetic oligonucleotide
ccataagttcgtttatgtgtaa

SEQ ID NO: 925 - DNA, 22 bp, Artificial Sequence
  Description of Artificial Sequence: Synthetic oligonucleotide
tccataagttcgtttatgtgta

SEQ ID NO: 926 - DNA, 22 bp, Artificial Sequence
  Description of Artificial Sequence: Synthetic oligonucleotide
ctcttccgaaacgaatgagtac

SEQ ID NO: 927 - DNA, 22 bp, Artificial Sequence
  Description of Artificial Sequence: Synthetic oligonucleotide
tctcttccgaaacgaatgagta

SEQ ID NO: 928 - DNA, 22 bp, Artificial Sequence
  Description of Artificial Sequence: Synthetic oligonucleotide
cttccgaaacgaatgagtacat

SEQ ID NO: 929 - DNA, 22 bp, Artificial Sequence
  Description of Artificial Sequence: Synthetic oligonucleotide
tcttccgaaacgaatgagtaca

SEQ ID NO: 930 - DNA, 22 bp, Artificial Sequence
  Description of Artificial Sequence: Synthetic oligonucleotide
tccgaaacgaatgagtacataa

SEQ ID NO: 931 - DNA, 22 bp, Artificial Sequence
  Description of Artificial Sequence: Synthetic oligonucleotide
ttccgaaacgaatgagtacata

SEQ ID NO: 932 - DNA, 22 bp, Artificial Sequence
  Description of Artificial Sequence: Synthetic oligonucleotide
ctgtctcttccgaaacgaatga

SEQ ID NO: 933 - DNA, 22 bp, Artificial Sequence
  Description of Artificial Sequence: Synthetic oligonucleotide
cctgtctcttccgaaacgaatg

SEQ ID NO: 934 - DNA, 22 bp, Artificial Sequence
  Description of Artificial Sequence: Synthetic oligonucleotide
acttcatcactaataaatgtac

SEQ ID NO: 935 - DNA, 22 bp, Artificial Sequence
  Description of Artificial Sequence: Synthetic oligonucleotide
cttcatcactaataaatgtact

SEQ ID NO: 936 - DNA, 22 bp, Artificial Sequence
  Description of Artificial Sequence: Synthetic oligonucleotide
caacttcatcactaataaatgt

SEQ ID NO: 937 - DNA, 22 bp, Artificial Sequence
  Description of Artificial Sequence: Synthetic oligonucleotide
aacttcatcactaataaatgta

SEQ ID NO: 938 - DNA, 22 bp, Artificial Sequence
  Description of Artificial Sequence: Synthetic oligonucleotide
gcaacttcatcactaataaatg

SEQ ID NO: 939 - DNA, 22 bp, Artificial Sequence
  Description of Artificial Sequence: Synthetic oligonucleotide
ccacatcaagcctacaagacaa

SEQ ID NO: 940 - DNA, 22 bp, Artificial Sequence
  Description of Artificial Sequence: Synthetic oligonucleotide
cacatcaagcctacaagacaag

SEQ ID NO: 941 - DNA, 22 bp, Artificial Sequence
  Description of Artificial Sequence: Synthetic oligonucleotide
agccacatcaagcctacaagac

SEQ ID NO: 942 - DNA, 22 bp, Artificial Sequence
  Description of Artificial Sequence: Synthetic oligonucleotide
gccacatcaagcctacaagaca

SEQ ID NO: 943 - DNA, 22 bp, Artificial Sequence
  Description of Artificial Sequence: Synthetic oligonucleotide
gctgagccacatcaagcctaca

SEQ ID NO: 944 - DNA, 22 bp, Artificial Sequence
  Description of Artificial Sequence: Synthetic oligonucleotide
ctgagccacatcaagcctacaa

SEQ ID NO: 945 - DNA, 22 bp, Artificial Sequence
  Description of Artificial Sequence: Synthetic oligonucleotide
tagctgagccacatcaagccta

SEQ ID NO: 946 - DNA, 22 bp, Artificial Sequence
  Description of Artificial Sequence: Synthetic oligonucleotide
agctgagccacatcaagcctac

SEQ ID NO: 947 - DNA, 22 bp, Artificial Sequence
  Description of Artificial Sequence: Synthetic oligonucleotide
gtatgccaggtatgtcaacaca

SEQ ID NO: 948 - DNA, 22 bp, Artificial Sequence
  Description of Artificial Sequence: Synthetic oligonucleotide
tatgccaggtatgtcaacacat

SEQ ID NO: 949 - DNA, 22 bp, Artificial Sequence
  Description of Artificial Sequence: Synthetic oligonucleotide
atgccaggtatgtcaacacata

SEQ ID NO: 950 - DNA, 22 bp, Artificial Sequence
  Description of Artificial Sequence: Synthetic oligonucleotide
tgccaggtatgtcaacacataa

SEQ ID NO: 951 - DNA, 22 bp, Artificial Sequence
  Description of Artificial Sequence: Synthetic oligonucleotide
ggtatgccaggtatgtcaacac

SEQ ID NO: 952 - DNA, 22 bp, Artificial Sequence
  Description of Artificial Sequence: Synthetic oligonucleotide
aatagtagttgtctgatatcac

SEQ ID NO: 953 - DNA, 22 bp, Artificial Sequence
  Description of Artificial Sequence: Synthetic oligonucleotide
taaaccaaagcactcacagtgt

SEQ ID NO: 954 - DNA, 22 bp, Artificial Sequence
  Description of Artificial Sequence: Synthetic oligonucleotide
agcactcacagtgtcaacaatt

SEQ ID NO: 955 - DNA, 22 bp, Artificial Sequence
  Description of Artificial Sequence: Synthetic oligonucleotide
gcactcacagtgtcaacaattt

SEQ ID NO: 956 - DNA, 22 bp, Artificial Sequence
  Description of Artificial Sequence: Synthetic oligonucleotide
aaagcactcacagtgtcaacaa

SEQ ID NO: 957 - DNA, 22 bp, Artificial Sequence
  Description of Artificial Sequence: Synthetic oligonucleotide
aagcactcacagtgtcaacaat

SEQ ID NO: 958 - DNA, 22 bp, Artificial Sequence
  Description of Artificial Sequence: Synthetic oligonucleotide
ccaaagcactcacagtgtcaac

SEQ ID NO: 959 - DNA, 22 bp, Artificial Sequence
  Description of Artificial Sequence: Synthetic oligonucleotide
caaagcactcacagtgtcaaca

SEQ ID NO: 960 - DNA, 22 bp, Artificial Sequence
  Description of Artificial Sequence: Synthetic oligonucleotide
aaccaaagcactcacagtgtca

SEQ ID NO: 961 - DNA, 22 bp, Artificial Sequence
  Description of Artificial Sequence: Synthetic oligonucleotide
accaaagcactcacagtgtcaa

SEQ ID NO: 962 - DNA, 22 bp, Artificial Sequence
  Description of Artificial Sequence: Synthetic oligonucleotide
gtcacatctgtgacatcacaac

SEQ ID NO: 963 - DNA, 22 bp, Artificial Sequence
  Description of Artificial Sequence: Synthetic oligonucleotide
tcacatctgtgacatcacaacc

SEQ ID NO: 964 - DNA, 22 bp, Artificial Sequence
  Description of Artificial Sequence: Synthetic oligonucleotide
cacatctgtgacatcacaacct

SEQ ID NO: 965 - DNA, 22 bp, Artificial Sequence
  Description of Artificial Sequence: Synthetic oligonucleotide
caggcatatagaccatattaaa

SEQ ID NO: 966 - DNA, 22 bp, Artificial Sequence
  Description of Artificial Sequence: Synthetic oligonucleotide
gcaggcatatagaccatattaa

SEQ ID NO: 967 - DNA, 22 bp, Artificial Sequence
  Description of Artificial Sequence: Synthetic oligonucleotide
agcaggcatatagaccatatta

SEQ ID NO: 968 - DNA, 22 bp, Artificial Sequence
  Description of Artificial Sequence: Synthetic oligonucleotide
ctagcaggcatatagaccatat

SEQ ID NO: 969 - DNA, 22 bp, Artificial Sequence
  Description of Artificial Sequence: Synthetic oligonucleotide
gtttcttggctatgtcagtcat

SEQ ID NO: 970 - DNA, 22 bp, Artificial Sequence
  Description of Artificial Sequence: Synthetic oligonucleotide
ggtttcttggctatgtcagtca

SEQ ID NO: 971 - DNA, 22 bp, Artificial Sequence
  Description of Artificial Sequence: Synthetic oligonucleotide
ttccacataccgcagacggtac

SEQ ID NO: 972 - DNA, 22 bp, Artificial Sequence
  Description of Artificial Sequence: Synthetic oligonucleotide
cataccgcagacggtacagact

SEQ ID NO: 973 - DNA, 22 bp, Artificial Sequence
  Description of Artificial Sequence: Synthetic oligonucleotide
ataaaccaaagcactcacagtg

SEQ ID NO: 974 - DNA, 22 bp, Artificial Sequence
  Description of Artificial Sequence: Synthetic oligonucleotide
tcataaaccaaagcactcacag

SEQ ID NO: 975 - DNA, 22 bp, Artificial Sequence
  Description of Artificial Sequence: Synthetic oligonucleotide
ctacgaccgtactgaatgcctt

SEQ ID NO: 976 - DNA, 22 bp, Artificial Sequence
  Description of Artificial Sequence: Synthetic oligonucleotide
tacgaccgtactgaatgccttc

SEQ ID NO: 977 - DNA, 22 bp, Artificial Sequence
  Description of Artificial Sequence: Synthetic oligonucleotide
cactacgaccgtactgaatgcc

SEQ ID NO: 978 - DNA, 22 bp, Artificial Sequence
  Description of Artificial Sequence: Synthetic oligonucleotide
aaagaactgacttaaagttctt

SEQ ID NO: 979 - DNA, 22 bp, Artificial Sequence
  Description of Artificial Sequence: Synthetic oligonucleotide
ataaagaactgacttaaagttc

SEQ ID NO: 980 - DNA, 22 bp, Artificial Sequence
  Description of Artificial Sequence: Synthetic oligonucleotide
taaagaactgacttaaagttct

SEQ ID NO: 981 - DNA, 22 bp, Artificial Sequence
  Description of Artificial Sequence: Synthetic oligonucleotide
taataaagaactgacttaaagt

SEQ ID NO: 982 - DNA, 22 bp, Artificial Sequence
  Description of Artificial Sequence: Synthetic oligonucleotide
aataaagaactgacttaaagtt

SEQ ID NO: 983 - DNA, 22 bp, Artificial Sequence
  Description of Artificial Sequence: Synthetic oligonucleotide
cctttatcagaaccagcaccaa

SEQ ID NO: 984 - DNA, 22 bp, Artificial Sequence
  Description of Artificial Sequence: Synthetic oligonucleotide
gccattgtgtatttagtaagac

SEQ ID NO: 985 - DNA, 22 bp, Artificial Sequence
  Description of Artificial Sequence: Synthetic oligonucleotide
ccattgtgtatttagtaagacg

SEQ ID NO: 986 - DNA, 22 bp, Artificial Sequence
  Description of Artificial Sequence: Synthetic oligonucleotide
taggcatggctctatcacattt

SEQ ID NO: 987 - DNA, 22 bp, Artificial Sequence
  Description of Artificial Sequence: Synthetic oligonucleotide
acattagggctcttccatatag

SEQ ID NO: 988 - DNA, 22 bp, Artificial Sequence
  Description of Artificial Sequence: Synthetic oligonucleotide
ctgaaaagcacgtagtgcgttt

SEQ ID NO: 989 - DNA, 22 bp, Artificial Sequence
  Description of Artificial Sequence: Synthetic oligonucleotide
tgaaaagcacgtagtgcgttta

SEQ ID NO: 990 - DNA, 22 bp, Artificial Sequence
  Description of Artificial Sequence: Synthetic oligonucleotide
agcacgtagtgcgtttatctag

SEQ ID NO: 991 - DNA, 22 bp, Artificial Sequence
  Description of Artificial Sequence: Synthetic oligonucleotide
aaagcacgtagtgcgtttatct

SEQ ID NO: 992 - DNA, 22 bp, Artificial Sequence
  Description of Artificial Sequence: Synthetic oligonucleotide
aagcacgtagtgcgtttatcta

SEQ ID NO: 993 - DNA, 22 bp, Artificial Sequence
  Description of Artificial Sequence: Synthetic oligonucleotide
gaaaagcacgtagtgcgtttat

SEQ ID NO: 994 - DNA, 22 bp, Artificial Sequence
  Description of Artificial Sequence: Synthetic oligonucleotide
aaaagcacgtagtgcgtttatc

SEQ ID NO: 995 - DNA, 22 bp, Artificial Sequence
  Description of Artificial Sequence: Synthetic oligonucleotide
caagcatttctcgcaaattcca

SEQ ID NO: 996 - DNA, 22 bp, Artificial Sequence
  Description of Artificial Sequence: Synthetic oligonucleotide
gcaagcatttctcgcaaattcc

SEQ ID NO: 997 - DNA, 22 bp, Artificial Sequence
  Description of Artificial Sequence: Synthetic oligonucleotide
aaatattgacacagttgagtat

SEQ ID NO: 998 - DNA, 22 bp, Artificial Sequence
  Description of Artificial Sequence: Synthetic oligonucleotide
aatattgacacagttgagtata

SEQ ID NO: 999 - DNA, 22 bp, Artificial Sequence
  Description of Artificial Sequence: Synthetic oligonucleotide
ttaaatattgacacagttgagt

SEQ ID NO: 1000 - DNA, 22 bp, Artificial Sequence
  Description of Artificial Sequence: Synthetic oligonucleotide
taaatattgacacagttgagta

SEQ ID NO: 1001 - DNA, 22 bp, Artificial Sequence
  Description of Artificial Sequence: Synthetic oligonucleotide
tttaaatattgacacagttgag

SEQ ID NO: 1002 - DNA, 22 bp, Artificial Sequence
  Description of Artificial Sequence: Synthetic oligonucleotide
tcggctgcaacacggacgaaac

SEQ ID NO: 1003 - DNA, 22 bp, Artificial Sequence
  Description of Artificial Sequence: Synthetic oligonucleotide
atcggctgcaacacggacgaaa

SEQ ID NO: 1004 - DNA, 22 bp, Artificial Sequence
  Description of Artificial Sequence: Synthetic oligonucleotide
ggctgcaacacggacgaaaccg

SEQ ID NO: 1005 - DNA, 22 bp, Artificial Sequence
  Description of Artificial Sequence: Synthetic oligonucleotide
cggctgcaacacggacgaaacc

SEQ ID NO: 1006 - DNA, 22 bp, Artificial Sequence
  Description of Artificial Sequence: Synthetic oligonucleotide
ctgcaacacggacgaaaccgta

SEQ ID NO: 1007 - DNA, 22 bp, Artificial Sequence
  Description of Artificial Sequence: Synthetic oligonucleotide
gctgcaacacggacgaaaccgt

SEQ ID NO: 1008 - DNA, 22 bp, Artificial Sequence
  Description of Artificial Sequence: Synthetic oligonucleotide
gcaacacggacgaaaccgtaag

SEQ ID NO: 1009 - DNA, 22 bp, Artificial Sequence
  Description of Artificial Sequence: Synthetic oligonucleotide
tgcaacacggacgaaaccgtaa

SEQ ID NO: 1010 - DNA, 22 bp, Artificial Sequence
  Description of Artificial Sequence: Synthetic oligonucleotide
gatcggctgcaacacggacgaa

SEQ ID NO: 1011 - DNA, 22 bp, Artificial Sequence
  Description of Artificial Sequence: Synthetic oligonucleotide
tgatcggctgcaacacggacga

SEQ ID NO: 1012 - DNA, 22 bp, Artificial Sequence
  Description of Artificial Sequence: Synthetic oligonucleotide
aagaaagtactactactctgta

SEQ ID NO: 1013 - DNA, 22 bp, Artificial Sequence
  Description of Artificial Sequence: Synthetic oligonucleotide
taaaaccactctgcaaaacagc

SEQ ID NO: 1014 - DNA, 22 bp, Artificial Sequence
  Description of Artificial Sequence: Synthetic oligonucleotide
ctaaaaccactctgcaaaacag

SEQ ID NO: 1015 - DNA, 22 bp, Artificial Sequence
  Description of Artificial Sequence: Synthetic oligonucleotide
tctcactagtggtccaaaactt

SEQ ID NO: 1016 - DNA, 22 bp, Artificial Sequence
  Description of Artificial Sequence: Synthetic oligonucleotide
ggaacaccatcaacaaatattt

SEQ ID NO: 1017 - DNA, 22 bp, Artificial Sequence
  Description of Artificial Sequence: Synthetic oligonucleotide
aactgtctattggtcatagtac

SEQ ID NO: 1018 - DNA, 22 bp, Artificial Sequence
  Description of Artificial Sequence: Synthetic oligonucleotide
actgtctattggtcatagtact

SEQ ID NO: 1019 - DNA, 22 bp, Artificial Sequence
  Description of Artificial Sequence: Synthetic oligonucleotide
gaaactgtctattggtcatagt

SEQ ID NO: 1020 - DNA, 22 bp, Artificial Sequence
  Description of Artificial Sequence: Synthetic oligonucleotide
aaactgtctattggtcatagta

SEQ ID NO: 1021 - DNA, 22 bp, Artificial Sequence
  Description of Artificial Sequence: Synthetic oligonucleotide
atgaaactgtctattggtcata

SEQ ID NO: 1022 - DNA, 22 bp, Artificial Sequence
  Description of Artificial Sequence: Synthetic oligonucleotide
tgaaactgtctattggtcatag

SEQ ID NO: 1023 - DNA, 22 bp, Artificial Sequence
  Description of Artificial Sequence: Synthetic oligonucleotide
tgatgaaactgtctattggtca

SEQ ID NO: 1024 - DNA, 22 bp, Artificial Sequence
  Description of Artificial Sequence: Synthetic oligonucleotide
gatgaaactgtctattggtcat

SEQ ID NO: 1025 - DNA, 22 bp, Artificial Sequence
  Description of Artificial Sequence: Synthetic oligonucleotide
cgcagacggtacagactgtgtt

SEQ ID NO: 1026 - DNA, 22 bp, Artificial Sequence
  Description of Artificial Sequence: Synthetic oligonucleotide
gcagacggtacagactgtgttt

SEQ ID NO: 1027 - DNA, 22 bp, Artificial Sequence
  Description of Artificial Sequence: Synthetic oligonucleotide
taagtgtaaaacccacagggtc

SEQ ID NO: 1028 - DNA, 22 bp, Artificial Sequence
  Description of Artificial Sequence: Synthetic oligonucleotide
aagtgtaaaacccacagggtca

SEQ ID NO: 1029 - DNA, 22 bp, Artificial Sequence
  Description of Artificial Sequence: Synthetic oligonucleotide
agtgtaaaacccacagggtcat

SEQ ID NO: 1030 - DNA, 22 bp, Artificial Sequence
  Description of Artificial Sequence: Synthetic oligonucleotide
gtgtaaaacccacagggtcatt

SEQ ID NO: 1031 - DNA, 22 bp, Artificial Sequence
  Description of Artificial Sequence: Synthetic oligonucleotide
accgcagacggtacagactgtg

SEQ ID NO: 1032 - DNA, 22 bp, Artificial Sequence
  Description of Artificial Sequence: Synthetic oligonucleotide
ccgcagacggtacagactgtgt

SEQ ID NO: 1033 - DNA, 22 bp, Artificial Sequence
  Description of Artificial Sequence: Synthetic oligonucleotide
tctgcacaagagtagactatat

SEQ ID NO: 1034 - DNA, 22 bp, Artificial Sequence
  Description of Artificial Sequence: Synthetic oligonucleotide
ctgcacaagagtagactatata

SEQ ID NO: 1035 - DNA, 22 bp, Artificial Sequence
  Description of Artificial Sequence: Synthetic oligonucleotide
tgcacaagagtagactatatat

SEQ ID NO: 1036 - DNA, 22 bp, Artificial Sequence
  Description of Artificial Sequence: Synthetic oligonucleotide
gcacaagagtagactatatatc

SEQ ID NO: 1037 - DNA, 22 bp, Artificial Sequence
  Description of Artificial Sequence: Synthetic oligonucleotide
cacaagagtagactatatatcg

SEQ ID NO: 1038 - DNA, 22 bp, Artificial Sequence
  Description of Artificial Sequence: Synthetic oligonucleotide
caagagtagactatatatcgta

SEQ ID NO: 1039 - DNA, 22 bp, Artificial Sequence
  Description of Artificial Sequence: Synthetic oligonucleotide
aagagtagactatatatcgtaa

SEQ ID NO: 1040 - DNA, 22 bp, Artificial Sequence
  Description of Artificial Sequence: Synthetic oligonucleotide
agagtagactatatatcgtaaa

SEQ ID NO: 1041 - DNA, 22 bp, Artificial Sequence
  Description of Artificial Sequence: Synthetic oligonucleotide
gagtagactatatatcgtaaac

SEQ ID NO: 1042 - DNA, 22 bp, Artificial Sequence
  Description of Artificial Sequence: Synthetic oligonucleotide
aattgtgcaatttgcggccaat

SEQ ID NO: 1043 - DNA, 22 bp, Artificial Sequence
  Description of Artificial Sequence: Synthetic oligonucleotide
attgtgcaatttgcggccaatg

SEQ ID NO: 1044 - DNA, 22 bp, Artificial Sequence
  Description of Artificial Sequence: Synthetic oligonucleotide
caaattgtgcaatttgcggcca

SEQ ID NO: 1045 - DNA, 22 bp, Artificial Sequence
  Description of Artificial Sequence: Synthetic oligonucleotide
aaattgtgcaatttgcggccaa

SEQ ID NO: 1046 - DNA, 22 bp, Artificial Sequence
  Description of Artificial Sequence: Synthetic oligonucleotide
gtgcaatttgcggccaatgttt

SEQ ID NO: 1047 - DNA, 22 bp, Artificial Sequence
  Description of Artificial Sequence: Synthetic oligonucleotide
tgcaatttgcggccaatgtttg

SEQ ID NO: 1048 - DNA, 22 bp, Artificial Sequence
  Description of Artificial Sequence: Synthetic oligonucleotide
ttgtgcaatttgcggccaatgt

SEQ ID NO: 1049 - DNA, 22 bp, Artificial Sequence
  Description of Artificial Sequence: Synthetic oligonucleotide
tgtgcaatttgcggccaatgtt

SEQ ID NO: 1050 - DNA, 22 bp, Artificial Sequence
  Description of Artificial Sequence: Synthetic oligonucleotide
ggcaaattgtgcaatttgcggc

SEQ ID NO: 1051 - DNA, 22 bp, Artificial Sequence
  Description of Artificial Sequence: Synthetic oligonucleotide
gcaaattgtgcaatttgcggcc

SEQ ID NO: 1052 - DNA, 22 bp, Artificial Sequence
  Description of Artificial Sequence: Synthetic oligonucleotide
ctcttcaacggtaatagtaccg

SEQ ID NO: 1053 - DNA, 22 bp, Artificial Sequence
  Description of Artificial Sequence: Synthetic oligonucleotide
ttacacgataaccagtaaagac

SEQ ID NO: 1054 - DNA, 22 bp, Artificial Sequence
  Description of Artificial Sequence: Synthetic oligonucleotide
gttacacgataaccagtaaaga

SEQ ID NO: 1055 - DNA, 22 bp, Artificial Sequence
  Description of Artificial Sequence: Synthetic oligonucleotide
acacgataaccagtaaagacat

SEQ ID NO: 1056 - DNA, 22 bp, Artificial Sequence
  Description of Artificial Sequence: Synthetic oligonucleotide
tacacgataaccagtaaagaca

SEQ ID NO: 1057 - DNA, 22 bp, Artificial Sequence
  Description of Artificial Sequence: Synthetic oligonucleotide
ttagttacacgataaccagtaa

SEQ ID NO: 1058 - DNA, 22 bp, Artificial Sequence
  Description of Artificial Sequence: Synthetic oligonucleotide
tttagttacacgataaccagta

SEQ ID NO: 1059 - DNA, 22 bp, Artificial Sequence
  Description of Artificial Sequence: Synthetic oligonucleotide
agttacacgataaccagtaaag

SEQ ID NO: 1060 - DNA, 22 bp, Artificial Sequence
  Description of Artificial Sequence: Synthetic oligonucleotide
tagttacacgataaccagtaaa

SEQ ID NO: 1061 - DNA, 22 bp, Artificial Sequence
  Description of Artificial Sequence: Synthetic oligonucleotide
agaacaacttcagaatcaccat

SEQ ID NO: 1062 - DNA, 22 bp, Artificial Sequence
  Description of Artificial Sequence: Synthetic oligonucleotide
aacaacttcagaatcaccatta

SEQ ID NO: 1063 - DNA, 22 bp, Artificial Sequence
  Description of Artificial Sequence: Synthetic oligonucleotide
acaacttcagaatcaccattag

SEQ ID NO: 1064 - DNA, 22 bp, Artificial Sequence
  Description of Artificial Sequence: Synthetic oligonucleotide
caacttcagaatcaccattagc

SEQ ID NO: 1065 - DNA, 22 bp, Artificial Sequence
  Description of Artificial Sequence: Synthetic oligonucleotide
acttcagaatcaccattagcaa

SEQ ID NO: 1066 - DNA, 22 bp, Artificial Sequence
  Description of Artificial Sequence: Synthetic oligonucleotide
aagctggtgtgtggaatgcatg

SEQ ID NO: 1067 - DNA, 22 bp, Artificial Sequence
  Description of Artificial Sequence: Synthetic oligonucleotide
aaagctggtgtgtggaatgcat

SEQ ID NO: 1068 - DNA, 22 bp, Artificial Sequence
  Description of Artificial Sequence: Synthetic oligonucleotide
gattaacagacaagactaattt

SEQ ID NO: 1069 - DNA, 22 bp, Artificial Sequence
  Description of Artificial Sequence: Synthetic oligonucleotide
ccattagcacacaatggaaaac

SEQ ID NO: 1070 - DNA, 22 bp, Artificial Sequence
  Description of Artificial Sequence: Synthetic oligonucleotide
ccaaaagggcacaagtttgtaa

SEQ ID NO: 1071 - DNA, 22 bp, Artificial Sequence
  Description of Artificial Sequence: Synthetic oligonucleotide
aaaagggcacaagtttgtaata

SEQ ID NO: 1072 - DNA, 22 bp, Artificial Sequence
  Description of Artificial Sequence: Synthetic oligonucleotide
caaaagggcacaagtttgtaat

SEQ ID NO: 1073 - DNA, 22 bp, Artificial Sequence
  Description of Artificial Sequence: Synthetic oligonucleotide
atattctggttctagtgtgccc

SEQ ID NO: 1074 - DNA, 22 bp, Artificial Sequence
  Description of Artificial Sequence: Synthetic oligonucleotide
tattctggttctagtgtgccct

SEQ ID NO: 1075 - DNA, 22 bp, Artificial Sequence
  Description of Artificial Sequence: Synthetic oligonucleotide
aaatattctggttctagtgtgc

SEQ ID NO: 1076 - DNA, 22 bp, Artificial Sequence
  Description of Artificial Sequence: Synthetic oligonucleotide
aatattctggttctagtgtgcc

SEQ ID NO: 1077 - DNA, 22 bp, Artificial Sequence
  Description of Artificial Sequence: Synthetic oligonucleotide
tgaaatattctggttctagtgt

SEQ ID NO: 1078 - DNA, 22 bp, Artificial Sequence
  Description of Artificial Sequence: Synthetic oligonucleotide
gaaatattctggttctagtgtg

SEQ ID NO: 1079 - DNA, 22 bp, Artificial Sequence
  Description of Artificial Sequence: Synthetic oligonucleotide
attgaaatattctggttctagt

SEQ ID NO: 1080 - DNA, 22 bp, Artificial Sequence
  Description of Artificial Sequence: Synthetic oligonucleotide
ttgaaatattctggttctagtg

SEQ ID NO: 1081 - DNA, 22 bp, Artificial Sequence
  Description of Artificial Sequence: Synthetic oligonucleotide
gaattgaaatattctggttcta

SEQ ID NO: 1082 - DNA, 22 bp, Artificial Sequence
  Description of Artificial Sequence: Synthetic oligonucleotide
aattgaaatattctggttctag

SEQ ID NO: 1083 - DNA, 22 bp, Artificial Sequence
  Description of Artificial Sequence: Synthetic oligonucleotide
tctttatacgcactacattcca

SEQ ID NO: 1084 - DNA, 22 bp, Artificial Sequence
  Description of Artificial Sequence: Synthetic oligonucleotide
atctttatacgcactacattcc

SEQ ID NO: 1085 - DNA, 22 bp, Artificial Sequence
  Description of Artificial Sequence: Synthetic oligonucleotide
gttggaccaaactgttgtccat

SEQ ID NO: 1086 - DNA, 22 bp, Artificial Sequence
  Description of Artificial Sequence: Synthetic oligonucleotide
ttggaccaaactgttgtccata

SEQ ID NO: 1087 - DNA, 22 bp, Artificial Sequence
  Description of Artificial Sequence: Synthetic oligonucleotide
ccaaactgttgtccatatgtca

SEQ ID NO: 1088 - DNA, 22 bp, Artificial Sequence
  Description of Artificial Sequence: Synthetic oligonucleotide
caaactgttgtccatatgtcat

SEQ ID NO: 1089 - DNA, 22 bp, Artificial Sequence
  Description of Artificial Sequence: Synthetic oligonucleotide
tggaccaaactgttgtccatat

SEQ ID NO: 1090 - DNA, 22 bp, Artificial Sequence
  Description of Artificial Sequence: Synthetic oligonucleotide
ggaccaaactgttgtccatatg

SEQ ID NO: 1091 - DNA, 22 bp, Artificial Sequence
  Description of Artificial Sequence: Synthetic oligonucleotide
gaccaaactgttgtccatatgt

SEQ ID NO: 1092 - DNA, 22 bp, Artificial Sequence
  Description of Artificial Sequence: Synthetic oligonucleotide
accaaactgttgtccatatgtc

SEQ ID NO: 1093 - DNA, 22 bp, Artificial Sequence
  Description of Artificial Sequence: Synthetic oligonucleotide
agactcacgttaacaatattgc

SEQ ID NO: 1094 - DNA, 22 bp, Artificial Sequence
  Description of Artificial Sequence: Synthetic oligonucleotide
catttatctataggcaaatatt

SEQ ID NO: 1095 - DNA, 22 bp, Artificial Sequence
  Description of Artificial Sequence: Synthetic oligonucleotide
caacatctctatttctatagag

SEQ ID NO: 1096 - DNA, 22 bp, Artificial Sequence
  Description of Artificial Sequence: Synthetic oligonucleotide
tcaacatctctatttctataga

SEQ ID NO: 1097 - DNA, 22 bp, Artificial Sequence
  Description of Artificial Sequence: Synthetic oligonucleotide
atctctatttctatagagacac

SEQ ID NO: 1098 - DNA, 22 bp, Artificial Sequence
  Description of Artificial Sequence: Synthetic oligonucleotide
catctctatttctatagagaca

SEQ ID NO: 1099 - DNA, 22 bp, Artificial Sequence
  Description of Artificial Sequence: Synthetic oligonucleotide
acatctctatttctatagagac

SEQ ID NO: 1100 - DNA, 22 bp, Artificial Sequence
  Description of Artificial Sequence: Synthetic oligonucleotide
aacatctctatttctatagaga

SEQ ID NO: 1101 - DNA, 22 bp, Artificial Sequence
  Description of Artificial Sequence: Synthetic oligonucleotide
agacgtactgtggcagctaaac

SEQ ID NO: 1102 - DNA, 22 bp, Artificial Sequence
  Description of Artificial Sequence: Synthetic oligonucleotide
gacgtactgtggcagctaaact

SEQ ID NO: 1103 - DNA, 22 bp, Artificial Sequence
  Description of Artificial Sequence: Synthetic oligonucleotide
tctgtgaattataaggtgaaat

SEQ ID NO: 1104 - DNA, 22 bp, Artificial Sequence
  Description of Artificial Sequence: Synthetic oligonucleotide
cgttaacaatattgcagcagta

SEQ ID NO: 1105 - DNA, 22 bp, Artificial Sequence
  Description of Artificial Sequence: Synthetic oligonucleotide
gttaacaatattgcagcagtac

SEQ ID NO: 1106 - DNA, 22 bp, Artificial Sequence
  Description of Artificial Sequence: Synthetic oligonucleotide
ctcacgttaacaatattgcagc

SEQ ID NO: 1107 - DNA, 22 bp, Artificial Sequence
  Description of Artificial Sequence: Synthetic oligonucleotide
tcacgttaacaatattgcagca

SEQ ID NO: 1108 - DNA, 22 bp, Artificial Sequence
  Description of Artificial Sequence: Synthetic oligonucleotide
cacgttaacaatattgcagcag

SEQ ID NO: 1109 - DNA, 22 bp, Artificial Sequence
  Description of Artificial Sequence: Synthetic oligonucleotide
acgttaacaatattgcagcagt

SEQ ID NO: 1110 - DNA, 22 bp, Artificial Sequence
  Description of Artificial Sequence: Synthetic oligonucleotide
tgtccatcaaagtgtcccttat

SEQ ID NO: 1111 - DNA, 22 bp, Artificial Sequence
  Description of Artificial Sequence: Synthetic oligonucleotide
taagcataattaaaacaaggaa

SEQ ID NO: 1112 - DNA, 22 bp, Artificial Sequence
  Description of Artificial Sequence: Synthetic oligonucleotide
ataagcataattaaaacaagga

SEQ ID NO: 1113 - DNA, 22 bp, Artificial Sequence
  Description of Artificial Sequence: Synthetic oligonucleotide
agcataattaaaacaaggaata

SEQ ID NO: 1114 - DNA, 22 bp, Artificial Sequence
  Description of Artificial Sequence: Synthetic oligonucleotide
aagcataattaaaacaaggaat

SEQ ID NO: 1115 - DNA, 22 bp, Artificial Sequence
  Description of Artificial Sequence: Synthetic oligonucleotide
gcataattaaaacaaggaatag

SEQ ID NO: 1116 - DNA, 22 bp, Artificial Sequence
  Description of Artificial Sequence: Synthetic oligonucleotide
taattaaaacaaggaatagcag

SEQ ID NO: 1117 - DNA, 22 bp, Artificial Sequence
  Description of Artificial Sequence: Synthetic oligonucleotide
ataattaaaacaaggaatagca

SEQ ID NO: 1118 - DNA, 22 bp, Artificial Sequence
  Description of Artificial Sequence: Synthetic oligonucleotide
attaaaacaaggaatagcagaa

SEQ ID NO: 1119 - DNA, 22 bp, Artificial Sequence
  Description of Artificial Sequence: Synthetic oligonucleotide
aattaaaacaaggaatagcaga

SEQ ID NO: 1120 - DNA, 22 bp, Artificial Sequence
  Description of Artificial Sequence: Synthetic oligonucleotide
agcatactcctgattaggatgt

SEQ ID NO: 1121 - DNA, 22 bp, Artificial Sequence
  Description of Artificial Sequence: Synthetic oligonucleotide
cagcatactcctgattaggatg

SEQ ID NO: 1122 - DNA, 22 bp, Artificial Sequence
  Description of Artificial Sequence: Synthetic oligonucleotide
ctcctgattaggatgtttagta

SEQ ID NO: 1123 - DNA, 22 bp, Artificial Sequence
  Description of Artificial Sequence: Synthetic oligonucleotide
actcctgattaggatgtttagt

SEQ ID NO: 1124 - DNA, 22 bp, Artificial Sequence
  Description of Artificial Sequence: Synthetic oligonucleotide
cctgattaggatgtttagtaag

SEQ ID NO: 1125 - DNA, 22 bp, Artificial Sequence
  Description of Artificial Sequence: Synthetic oligonucleotide
tcctgattaggatgtttagtaa

SEQ ID NO: 1126 - DNA, 22 bp, Artificial Sequence
  Description of Artificial Sequence: Synthetic oligonucleotide
catactcctgattaggatgttt

SEQ ID NO: 1127 - DNA, 22 bp, Artificial Sequence
  Description of Artificial Sequence: Synthetic oligonucleotide
gcatactcctgattaggatgtt

SEQ ID NO: 1128 - DNA, 22 bp, Artificial Sequence
  Description of Artificial Sequence: Synthetic oligonucleotide
tactcctgattaggatgtttag

SEQ ID NO: 1129 - DNA, 22 bp, Artificial Sequence
  Description of Artificial Sequence: Synthetic oligonucleotide
atactcctgattaggatgttta

SEQ ID NO: 1130 - DNA, 22 bp, Artificial Sequence
  Description of Artificial Sequence: Synthetic oligonucleotide
agccagtaattctaacatagtg

SEQ ID NO: 1131 - DNA, 22 bp, Artificial Sequence
  Description of Artificial Sequence: Synthetic oligonucleotide
aagccagtaattctaacatagt

SEQ ID NO: 1132 - DNA, 22 bp, Artificial Sequence
  Description of Artificial Sequence: Synthetic oligonucleotide
agtaattctaacatagtgctct

SEQ ID NO: 1133 - DNA, 22 bp, Artificial Sequence
  Description of Artificial Sequence: Synthetic oligonucleotide
cagtaattctaacatagtgctc

SEQ ID NO: 1134 - DNA, 22 bp, Artificial Sequence
  Description of Artificial Sequence: Synthetic oligonucleotide
ccagtaattctaacatagtgct

SEQ ID NO: 1135 - DNA, 22 bp, Artificial Sequence
  Description of Artificial Sequence: Synthetic oligonucleotide
gccagtaattctaacatagtgc

SEQ ID NO: 1136 - DNA, 22 bp, Artificial Sequence
  Description of Artificial Sequence: Synthetic oligonucleotide
tttatcagaaccagcaccaaaa

SEQ ID NO: 1137 - DNA, 22 bp, Artificial Sequence
  Description of Artificial Sequence: Synthetic oligonucleotide
ctttatcagaaccagcaccaaa

SEQ ID NO: 1138 - DNA, 22 bp, Artificial Sequence
  Description of Artificial Sequence: Synthetic oligonucleotide
atcagaaccagcaccaaaatgt

SEQ ID NO: 1139 - DNA, 22 bp, Artificial Sequence
  Description of Artificial Sequence: Synthetic oligonucleotide
tatcagaaccagcaccaaaatg

SEQ ID NO: 1140 - DNA, 22 bp, Artificial Sequence
  Description of Artificial Sequence: Synthetic oligonucleotide
ttatcagaaccagcaccaaaat

SEQ ID NO: 1141 - DNA, 22 bp, Artificial Sequence
  Description of Artificial Sequence: Synthetic oligonucleotide
gaaccagcaccaaaatgtataa

SEQ ID NO: 1142 - DNA, 22 bp, Artificial Sequence
  Description of Artificial Sequence: Synthetic oligonucleotide
agaaccagcaccaaaatgtata

SEQ ID NO: 1143 - DNA, 22 bp, Artificial Sequence
  Description of Artificial Sequence: Synthetic oligonucleotide
cagaaccagcaccaaaatgtat

SEQ ID NO: 1144 - DNA, 22 bp, Artificial Sequence
  Description of Artificial Sequence: Synthetic oligonucleotide
acgagaattcattctgcacaag

SEQ ID NO: 1145 - DNA, 22 bp, Artificial Sequence
  Description of Artificial Sequence: Synthetic oligonucleotide
tctgatcccaatatttaaaata

SEQ ID NO: 1146 - DNA, 22 bp, Artificial Sequence
  Description of Artificial Sequence: Synthetic oligonucleotide
gtctgatcccaatatttaaaat

SEQ ID NO: 1147 - DNA, 22 bp, Artificial Sequence
  Description of Artificial Sequence: Synthetic oligonucleotide
tgtctgatcccaatatttaaaa

SEQ ID NO: 1148 - DNA, 22 bp, Artificial Sequence
  Description of Artificial Sequence: Synthetic oligonucleotide
atgtctgatcccaatatttaaa

SEQ ID NO: 1149 - DNA, 22 bp, Artificial Sequence
  Description of Artificial Sequence: Synthetic oligonucleotide
atcccaatatttaaaataacgg

SEQ ID NO: 1150 - DNA, 22 bp, Artificial Sequence
  Description of Artificial Sequence: Synthetic oligonucleotide
gatcccaatatttaaaataacg

SEQ ID NO: 1151 - DNA, 22 bp, Artificial Sequence
  Description of Artificial Sequence: Synthetic oligonucleotide
tgatcccaatatttaaaataac

SEQ ID NO: 1152 - DNA, 22 bp, Artificial Sequence
  Description of Artificial Sequence: Synthetic oligonucleotide
ctgatcccaatatttaaaataa

SEQ ID NO: 1153 - DNA, 22 bp, Artificial Sequence
  Description of Artificial Sequence: Synthetic oligonucleotide
tatgtctgatcccaatatttaa

SEQ ID NO: 1154 - DNA, 22 bp, Artificial Sequence
  Description of Artificial Sequence: Synthetic oligonucleotide
gtatgtctgatcccaatattta

SEQ ID NO: 1155 - DNA, 22 bp, Artificial Sequence
  Description of Artificial Sequence: Synthetic oligonucleotide
ttctttgcactaatggcatact

SEQ ID NO: 1156 - DNA, 22 bp, Artificial Sequence
  Description of Artificial Sequence: Synthetic oligonucleotide
attctttgcactaatggcatac

SEQ ID NO: 1157 - DNA, 22 bp, Artificial Sequence
  Description of Artificial Sequence: Synthetic oligonucleotide
tattctttgcactaatggcata

SEQ ID NO: 1158 - DNA, 22 bp, Artificial Sequence
  Description of Artificial Sequence: Synthetic oligonucleotide
ctattctttgcactaatggcat

SEQ ID NO: 1159 - DNA, 22 bp, Artificial Sequence
  Description of Artificial Sequence: Synthetic oligonucleotide
ttgcactaatggcatacttaag

SEQ ID NO: 1160 - DNA, 22 bp, Artificial Sequence
  Description of Artificial Sequence: Synthetic oligonucleotide
tttgcactaatggcatacttaa

SEQ ID NO: 1161 - DNA, 22 bp, Artificial Sequence
  Description of Artificial Sequence: Synthetic oligonucleotide
ctttgcactaatggcatactta

SEQ ID NO: 1162 - DNA, 22 bp, Artificial Sequence
  Description of Artificial Sequence: Synthetic oligonucleotide
tctttgcactaatggcatactt

SEQ ID NO: 1163 - DNA, 22 bp, Artificial Sequence
  Description of Artificial Sequence: Synthetic oligonucleotide
tctattctttgcactaatggca

SEQ ID NO: 1164 - DNA, 22 bp, Artificial Sequence
  Description of Artificial Sequence: Synthetic oligonucleotide
ctctattctttgcactaatggc

SEQ ID NO: 1165 - DNA, 22 bp, Artificial Sequence
  Description of Artificial Sequence: Synthetic oligonucleotide
cagtaccagtgtgtgtacacaa

SEQ ID NO: 1166 - DNA, 22 bp, Artificial Sequence
  Description of Artificial Sequence: Synthetic oligonucleotide
ccagtaccagtgtgtgtacaca

SEQ ID NO: 1167 - DNA, 22 bp, Artificial Sequence
  Description of Artificial Sequence: Synthetic oligonucleotide
gtaccagtgtgtgtacacaaca

SEQ ID NO: 1168 - DNA, 22 bp, Artificial Sequence
  Description of Artificial Sequence: Synthetic oligonucleotide
agtaccagtgtgtgtacacaac

SEQ ID NO: 1169 - DNA, 22 bp, Artificial Sequence
  Description of Artificial Sequence: Synthetic oligonucleotide
ttagatgaacctgtttgcgcat

SEQ ID NO: 1170 - DNA, 22 bp, Artificial Sequence
  Description of Artificial Sequence: Synthetic oligonucleotide
tgtgatgttgatatgacatggt

SEQ ID NO: 1171 - DNA, 22 bp, Artificial Sequence
  Description of Artificial Sequence: Synthetic oligonucleotide
tttctggattgaatgaccacat

SEQ ID NO: 1172 - DNA, 22 bp, Artificial Sequence
  Description of Artificial Sequence: Synthetic oligonucleotide
gtttctggattgaatgaccaca

SEQ ID NO: 1173 - DNA, 22 bp, Artificial Sequence
  Description of Artificial Sequence: Synthetic oligonucleotide
gtgatgttgatatgacatggtc

SEQ ID NO: 1174 - DNA, 22 bp, Artificial Sequence
  Description of Artificial Sequence: Synthetic oligonucleotide
gtgaaaatgtggtggctctttc

SEQ ID NO: 1175 - DNA, 22 bp, Artificial Sequence
  Description of Artificial Sequence: Synthetic oligonucleotide
ggtgaaaatgtggtggctcttt

SEQ ID NO: 1176 - DNA, 22 bp, Artificial Sequence
  Description of Artificial Sequence: Synthetic oligonucleotide
gaaaatgtggtggctctttcaa

SEQ ID NO: 1177 - DNA, 22 bp, Artificial Sequence
  Description of Artificial Sequence: Synthetic oligonucleotide
tgaaaatgtggtggctctttca

SEQ ID NO: 1178 - DNA, 22 bp, Artificial Sequence
  Description of Artificial Sequence: Synthetic oligonucleotide
ctcggtgaaaatgtggtggctc

SEQ ID NO: 1179 - DNA, 22 bp, Artificial Sequence
  Description of Artificial Sequence: Synthetic oligonucleotide
cctcggtgaaaatgtggtggct

SEQ ID NO: 1180 - DNA, 22 bp, Artificial Sequence
  Description of Artificial Sequence: Synthetic oligonucleotide
cggtgaaaatgtggtggctctt

SEQ ID NO: 1181 - DNA, 22 bp, Artificial Sequence
  Description of Artificial Sequence: Synthetic oligonucleotide
tcggtgaaaatgtggtggctct

SEQ ID NO: 1182 - DNA, 22 bp, Artificial Sequence
  Description of Artificial Sequence: Synthetic oligonucleotide
gcctcggtgaaaatgtggtggc

SEQ ID NO: 1183 - DNA, 22 bp, Artificial Sequence
  Description of Artificial Sequence: Synthetic oligonucleotide
ggcctcggtgaaaatgtggtgg

SEQ ID NO: 1184 - DNA, 22 bp, Artificial Sequence
  Description of Artificial Sequence: Synthetic oligonucleotide
caggagaagttcccctactgct

SEQ ID NO: 1185 - DNA, 22 bp, Artificial Sequence
  Description of Artificial Sequence: Synthetic oligonucleotide
gcaggagaagttcccctactgc

SEQ ID NO: 1186 - DNA, 22 bp, Artificial Sequence
  Description of Artificial Sequence: Synthetic oligonucleotide
gagaagttcccctactgctgcc

SEQ ID NO: 1187 - DNA, 22 bp, Artificial Sequence
  Description of Artificial Sequence: Synthetic oligonucleotide
ggagaagttcccctactgctgc

SEQ ID NO: 1188 - DNA, 22 bp, Artificial Sequence
  Description of Artificial Sequence: Synthetic oligonucleotide
aggagaagttcccctactgctg

SEQ ID NO: 1189 - DNA, 22 bp, Artificial Sequence
  Description of Artificial Sequence: Synthetic oligonucleotide
attgtctaacaacatcaaaagg

SEQ ID NO: 1190 - DNA, 22 bp, Artificial Sequence
  Description of Artificial Sequence: Synthetic oligonucleotide
cattgtctaacaacatcaaaag

SEQ ID NO: 1191 - DNA, 22 bp, Artificial Sequence
  Description of Artificial Sequence: Synthetic oligonucleotide
aagaagatgtacattctaacca

SEQ ID NO: 1192 - DNA, 22 bp, Artificial Sequence
  Description of Artificial Sequence: Synthetic oligonucleotide
agcattgtctaacaacatcaaa

SEQ ID NO: 1193 - DNA, 22 bp, Artificial Sequence
  Description of Artificial Sequence: Synthetic oligonucleotide
tctaacaacatcaaaaggtgta

SEQ ID NO: 1194 - DNA, 22 bp, Artificial Sequence
  Description of Artificial Sequence: Synthetic oligonucleotide
gtctaacaacatcaaaaggtgt

SEQ ID NO: 1195 - DNA, 22 bp, Artificial Sequence
  Description of Artificial Sequence: Synthetic oligonucleotide
tgtctaacaacatcaaaaggtg

SEQ ID NO: 1196 - DNA, 22 bp, Artificial Sequence
  Description of Artificial Sequence: Synthetic oligonucleotide
ttgtctaacaacatcaaaaggt

SEQ ID NO: 1197 - DNA, 22 bp, Artificial Sequence
  Description of Artificial Sequence: Synthetic oligonucleotide
gagcattgtctaacaacatcaa

SEQ ID NO: 1198 - DNA, 22 bp, Artificial Sequence
  Description of Artificial Sequence: Synthetic oligonucleotide
tgagcattgtctaacaacatca

SEQ ID NO: 1199 - DNA, 22 bp, Artificial Sequence
  Description of Artificial Sequence: Synthetic oligonucleotide
acattacaagagtgagctgttt

SEQ ID NO: 1200 - DNA, 22 bp, Artificial Sequence
  Description of Artificial Sequence: Synthetic oligonucleotide
attacaagagtgagctgtttca

SEQ ID NO: 1201 - DNA, 22 bp, Artificial Sequence
  Description of Artificial Sequence: Synthetic oligonucleotide
ccttagacacagcaaagtcata

SEQ ID NO: 1202 - DNA, 22 bp, Artificial Sequence
  Description of Artificial Sequence: Synthetic oligonucleotide
aacccttagacacagcaaagtc

SEQ ID NO: 1203 - DNA, 22 bp, Artificial Sequence
  Description of Artificial Sequence: Synthetic oligonucleotide
cgcacggtgtaagacgggctgc

SEQ ID NO: 1204 - DNA, 22 bp, Artificial Sequence
  Description of Artificial Sequence: Synthetic oligonucleotide
gcacggtgtaagacgggctgca

SEQ ID NO: 1205 - DNA, 22 bp, Artificial Sequence
  Description of Artificial Sequence: Synthetic oligonucleotide
cacggtgtaagacgggctgcac

SEQ ID NO: 1206 - DNA, 22 bp, Artificial Sequence
  Description of Artificial Sequence: Synthetic oligonucleotide
acggtgtaagacgggctgcact

SEQ ID NO: 1207 - DNA, 22 bp, Artificial Sequence
  Description of Artificial Sequence: Synthetic oligonucleotide
cggtgtaagacgggctgcactt

SEQ ID NO: 1208 - DNA, 22 bp, Artificial Sequence
  Description of Artificial Sequence: Synthetic oligonucleotide
ggtgtaagacgggctgcactta

SEQ ID NO: 1209 - DNA, 22 bp, Artificial Sequence
  Description of Artificial Sequence: Synthetic oligonucleotide
gtgtaagacgggctgcacttac

SEQ ID NO: 1210 - DNA, 22 bp, Artificial Sequence
  Description of Artificial Sequence: Synthetic oligonucleotide
tgtaagacgggctgcacttaca

SEQ ID NO: 1211 - DNA, 22 bp, Artificial Sequence
  Description of Artificial Sequence: Synthetic oligonucleotide
gtaagacgggctgcacttacac

SEQ ID NO: 1212 - DNA, 22 bp, Artificial Sequence
  Description of Artificial Sequence: Synthetic oligonucleotide
taagacgggctgcacttacacc

SEQ ID NO: 1213 - DNA, 22 bp, Artificial Sequence
  Description of Artificial Sequence: Synthetic oligonucleotide
tgattatctaatgtcagtacac

SEQ ID NO: 1214 - DNA, 22 bp, Artificial Sequence
  Description of Artificial Sequence: Synthetic oligonucleotide
tcttgattatctaatgtcagta

SEQ ID NO: 1215 - DNA, 22 bp, Artificial Sequence
  Description of Artificial Sequence: Synthetic oligonucleotide
cttgattatctaatgtcagtac

SEQ ID NO: 1216 - DNA, 22 bp, Artificial Sequence
  Description of Artificial Sequence: Synthetic oligonucleotide
gattatctaatgtcagtacacc

SEQ ID NO: 1217 - DNA, 22 bp, Artificial Sequence
  Description of Artificial Sequence: Synthetic oligonucleotide
gatcttgattatctaatgtcag

SEQ ID NO: 1218 - DNA, 22 bp, Artificial Sequence
  Description of Artificial Sequence: Synthetic oligonucleotide
atcttgattatctaatgtcagt

SEQ ID NO: 1219 - DNA, 22 bp, Artificial Sequence
  Description of Artificial Sequence: Synthetic oligonucleotide
tctgttgtcacttactgtacaa

SEQ ID NO: 1220 - DNA, 22 bp, Artificial Sequence
  Description of Artificial Sequence: Synthetic oligonucleotide
ctgttgtcacttactgtacaag

SEQ ID NO: 1221 - DNA, 22 bp, Artificial Sequence
  Description of Artificial Sequence: Synthetic oligonucleotide
catctgttgtcacttactgtac

SEQ ID NO: 1222 - DNA, 22 bp, Artificial Sequence
  Description of Artificial Sequence: Synthetic oligonucleotide
atctgttgtcacttactgtaca

SEQ ID NO: 1223 - DNA, 22 bp, Artificial Sequence
  Description of Artificial Sequence: Synthetic oligonucleotide
ttgtcacttactgtacaagcaa

SEQ ID NO: 1224 - DNA, 22 bp, Artificial Sequence
  Description of Artificial Sequence: Synthetic oligonucleotide
tgtcacttactgtacaagcaaa

SEQ ID NO: 1225 - DNA, 22 bp, Artificial Sequence
  Description of Artificial Sequence: Synthetic oligonucleotide
tgttgtcacttactgtacaagc

SEQ ID NO: 1226 - DNA, 22 bp, Artificial Sequence
  Description of Artificial Sequence: Synthetic oligonucleotide
gttgtcacttactgtacaagca

SEQ ID NO: 1227 - DNA, 22 bp, Artificial Sequence
  Description of Artificial Sequence: Synthetic oligonucleotide
aacatctgttgtcacttactgt

SEQ ID NO: 1228 - DNA, 22 bp, Artificial Sequence
  Description of Artificial Sequence: Synthetic oligonucleotide
acatctgttgtcacttactgta

SEQ ID NO: 1229 - DNA, 22 bp, Artificial Sequence
  Description of Artificial Sequence: Synthetic oligonucleotide
tggggtccattatcagacattt

SEQ ID NO: 1230 - DNA, 22 bp, Artificial Sequence
  Description of Artificial Sequence: Synthetic oligonucleotide
aatcatctggtaatttataatt

SEQ ID NO: 1231 - DNA, 22 bp, Artificial Sequence
  Description of Artificial Sequence: Synthetic oligonucleotide
atcatctggtaatttataatta

SEQ ID NO: 1232 - DNA, 22 bp, Artificial Sequence
  Description of Artificial Sequence: Synthetic oligonucleotide
ccaaaacttgtaggtgggaaca

SEQ ID NO: 1233 - DNA, 22 bp, Artificial Sequence
  Description of Artificial Sequence: Synthetic oligonucleotide
tcagcattccaagaatgttctg

SEQ ID NO: 1234 - DNA, 22 bp, Artificial Sequence
  Description of Artificial Sequence: Synthetic oligonucleotide
cagcattccaagaatgttctgt

SEQ ID NO: 1235 - DNA, 22 bp, Artificial Sequence
  Description of Artificial Sequence: Synthetic oligonucleotide
agtttacatcctgattatgtac

SEQ ID NO: 1236 - DNA, 22 bp, Artificial Sequence
  Description of Artificial Sequence: Synthetic oligonucleotide
cattccaagaatgttctgttat

SEQ ID NO: 1237 - DNA, 22 bp, Artificial Sequence
  Description of Artificial Sequence: Synthetic oligonucleotide
ttacatcctgattatgtacaac

SEQ ID NO: 1238 - DNA, 22 bp, Artificial Sequence
  Description of Artificial Sequence: Synthetic oligonucleotide
tttacatcctgattatgtacaa

SEQ ID NO: 1239 - DNA, 22 bp, Artificial Sequence
  Description of Artificial Sequence: Synthetic oligonucleotide
gtttacatcctgattatgtaca

SEQ ID NO: 1240 - DNA, 22 bp, Artificial Sequence
  Description of Artificial Sequence: Synthetic oligonucleotide
gaagcctcagcagcagatttct

SEQ ID NO: 1241 - DNA, 22 bp, Artificial Sequence
  Description of Artificial Sequence: Synthetic oligonucleotide
aagcctcagcagcagatttctt

SEQ ID NO: 1242 - DNA, 22 bp, Artificial Sequence
  Description of Artificial Sequence: Synthetic oligonucleotide
tagaagcctcagcagcagattt

SEQ ID NO: 1243 - DNA, 22 bp, Artificial Sequence
  Description of Artificial Sequence: Synthetic oligonucleotide
agaagcctcagcagcagatttc

SEQ ID NO: 1244 - DNA, 22 bp, Artificial Sequence
  Description of Artificial Sequence: Synthetic oligonucleotide
ttagaagcctcagcagcagatt

SEQ ID NO: 1245 - DNA, 22 bp, Artificial Sequence
  Description of Artificial Sequence: Synthetic oligonucleotide
gctccactaaaatacttgtact

SEQ ID NO: 1246 - DNA, 22 bp, Artificial Sequence
  Description of Artificial Sequence: Synthetic oligonucleotide
ctccactaaaatacttgtactt

SEQ ID NO: 1247 - DNA, 22 bp, Artificial Sequence
  Description of Artificial Sequence: Synthetic oligonucleotide
aaatgttaaaaacactattagc

SEQ ID NO: 1248 - DNA, 22 bp, Artificial Sequence
  Description of Artificial Sequence: Synthetic oligonucleotide
aatgttaaaaacactattagca

SEQ ID NO: 1249 - DNA, 22 bp, Artificial Sequence
  Description of Artificial Sequence: Synthetic oligonucleotide
atgttaaaaacactattagcat

SEQ ID NO: 1250 - DNA, 22 bp, Artificial Sequence
  Description of Artificial Sequence: Synthetic oligonucleotide
tgttaaaaacactattagcata

SEQ ID NO: 1251 - DNA, 22 bp, Artificial Sequence
  Description of Artificial Sequence: Synthetic oligonucleotide
gttaaaaacactattagcataa

SEQ ID NO: 1252 - DNA, 22 bp, Artificial Sequence
  Description of Artificial Sequence: Synthetic oligonucleotide
ttaaaaacactattagcataag

SEQ ID NO: 1253 - DNA, 22 bp, Artificial Sequence
  Description of Artificial Sequence: Synthetic oligonucleotide
taaaaacactattagcataagc

SEQ ID NO: 1254 - DNA, 22 bp, Artificial Sequence
  Description of Artificial Sequence: Synthetic oligonucleotide
aaaaacactattagcataagca

SEQ ID NO: 1255 - DNA, 22 bp, Artificial Sequence
  Description of Artificial Sequence: Synthetic oligonucleotide
acaaatgttaaaaacactatta

SEQ ID NO: 1256 - DNA, 22 bp, Artificial Sequence
  Description of Artificial Sequence: Synthetic oligonucleotide
caaatgttaaaaacactattag

SEQ ID NO: 1257 - DNA, 22 bp, Artificial Sequence
  Description of Artificial Sequence: Synthetic oligonucleotide
catttattaaatggaaaaccag

SEQ ID NO: 1258 - DNA, 22 bp, Artificial Sequence
  Description of Artificial Sequence: Synthetic oligonucleotide
ccatttattaaatggaaaacca

SEQ ID NO: 1259 - DNA, 22 bp, Artificial Sequence
  Description of Artificial Sequence: Synthetic oligonucleotide
cccatttattaaatggaaaacc

SEQ ID NO: 1260 - DNA, 22 bp, Artificial Sequence
  Description of Artificial Sequence: Synthetic oligonucleotide
ccccatttattaaatggaaaac

SEQ ID NO: 1261 - DNA, 22 bp, Artificial Sequence
  Description of Artificial Sequence: Synthetic oligonucleotide
tattaaatggaaaaccagctga

SEQ ID NO: 1262 - DNA, 22 bp, Artificial Sequence
  Description of Artificial Sequence: Synthetic oligonucleotide
ttattaaatggaaaaccagctg

SEQ ID NO: 1263 - DNA, 22 bp, Artificial Sequence
  Description of Artificial Sequence: Synthetic oligonucleotide
tttattaaatggaaaaccagct

SEQ ID NO: 1264 - DNA, 22 bp, Artificial Sequence
  Description of Artificial Sequence: Synthetic oligonucleotide
atttattaaatggaaaaccagc

SEQ ID NO: 1265 - DNA, 22 bp, Artificial Sequence
  Description of Artificial Sequence: Synthetic oligonucleotide
accccatttattaaatggaaaa

SEQ ID NO: 1266 - DNA, 22 bp, Artificial Sequence
  Description of Artificial Sequence: Synthetic oligonucleotide
tccacataccgcagacggtaca

SEQ ID NO: 1267 - DNA, 22 bp, Artificial Sequence
  Description of Artificial Sequence: Synthetic oligonucleotide
ccacataccgcagacggtacag

SEQ ID NO: 1268 - DNA, 22 bp, Artificial Sequence
  Description of Artificial Sequence: Synthetic oligonucleotide
ataccgcagacggtacagactg

SEQ ID NO: 1269 - DNA, 22 bp, Artificial Sequence
  Description of Artificial Sequence: Synthetic oligonucleotide
tttccacataccgcagacggta

SEQ ID NO: 1270 - DNA, 22 bp, Artificial Sequence
  Description of Artificial Sequence: Synthetic oligonucleotide
ctttccacataccgcagacggt

SEQ ID NO: 1271 - DNA, 22 bp, Artificial Sequence
  Description of Artificial Sequence: Synthetic oligonucleotide
taggcagctctccctagcattg

SEQ ID NO: 1272 - DNA, 22 bp, Artificial Sequence
  Description of Artificial Sequence: Synthetic oligonucleotide
aggcagctctccctagcattgt

SEQ ID NO: 1273 - DNA, 22 bp, Artificial Sequence
  Description of Artificial Sequence: Synthetic oligonucleotide
tctccctagcattgttcactgt

SEQ ID NO: 1274 - DNA, 22 bp, Artificial Sequence
  Description of Artificial Sequence: Synthetic oligonucleotide
ctccctagcattgttcactgta

SEQ ID NO: 1275 - DNA, 22 bp, Artificial Sequence
  Description of Artificial Sequence: Synthetic oligonucleotide
gctctccctagcattgttcact

SEQ ID NO: 1276 - DNA, 22 bp, Artificial Sequence
  Description of Artificial Sequence: Synthetic oligonucleotide
ctctccctagcattgttcactg

SEQ ID NO: 1277 - DNA, 22 bp, Artificial Sequence
  Description of Artificial Sequence: Synthetic oligonucleotide
cagctctccctagcattgttca

SEQ ID NO: 1278 - DNA, 22 bp, Artificial Sequence
  Description of Artificial Sequence: Synthetic oligonucleotide
agctctccctagcattgttcac

SEQ ID NO: 1279 - DNA, 22 bp, Artificial Sequence
  Description of Artificial Sequence: Synthetic oligonucleotide
ggcagctctccctagcattgtt

SEQ ID NO: 1280 - DNA, 22 bp, Artificial Sequence
  Description of Artificial Sequence: Synthetic oligonucleotide
gcagctctccctagcattgttc

SEQ ID NO: 1281 - DNA, 22 bp, Artificial Sequence
  Description of Artificial Sequence: Synthetic oligonucleotide
ttactaggttccattgttcaag

SEQ ID NO: 1282 - DNA, 22 bp, Artificial Sequence
  Description of Artificial Sequence: Synthetic oligonucleotide
tactaggttccattgttcaagg

SEQ ID NO: 1283 - DNA, 22 bp, Artificial Sequence
  Description of Artificial Sequence: Synthetic oligonucleotide
actaggttccattgttcaagga

SEQ ID NO: 1284 - DNA, 22 bp, Artificial Sequence
  Description of Artificial Sequence: Synthetic oligonucleotide
ctaggttccattgttcaaggag

SEQ ID NO: 1285 - DNA, 22 bp, Artificial Sequence
  Description of Artificial Sequence: Synthetic oligonucleotide
tattactaggttccattgttca

SEQ ID NO: 1286 - DNA, 22 bp, Artificial Sequence
  Description of Artificial Sequence: Synthetic oligonucleotide
attactaggttccattgttcaa

SEQ ID NO: 1287 - DNA, 22 bp, Artificial Sequence
  Description of Artificial Sequence: Synthetic oligonucleotide
gactcttaccagtaccaggtgg

SEQ ID NO: 1288 - DNA, 22 bp, Artificial Sequence
  Description of Artificial Sequence: Synthetic oligonucleotide
tgactcttaccagtaccaggtg

SEQ ID NO: 1289 - DNA, 22 bp, Artificial Sequence
  Description of Artificial Sequence: Synthetic oligonucleotide
caaaatgactcttaccagtacc

SEQ ID NO: 1290 - DNA, 22 bp, Artificial Sequence
  Description of Artificial Sequence: Synthetic oligonucleotide
ttgttaccactctaacagaacc

SEQ ID NO: 1291 - DNA, 22 bp, Artificial Sequence
  Description of Artificial Sequence: Synthetic oligonucleotide
gcaaaatgactcttaccagtac

SEQ ID NO: 1292 - DNA, 22 bp, Artificial Sequence
  Description of Artificial Sequence: Synthetic oligonucleotide
ccgttcaatcataagtgtacca

SEQ ID NO: 1293 - DNA, 22 bp, Artificial Sequence
  Description of Artificial Sequence: Synthetic oligonucleotide
ctaacaacatcaaaaggtgtaa

SEQ ID NO: 1294 - DNA, 22 bp, Artificial Sequence
  Description of Artificial Sequence: Synthetic oligonucleotide
gcattccaagaatgttctgtta

SEQ ID NO: 1295 - DNA, 22 bp, Artificial Sequence
  Description of Artificial Sequence: Synthetic oligonucleotide
tcttcggtagtagccaatttgg

SEQ ID NO: 1296 - DNA, 22 bp, Artificial Sequence
  Description of Artificial Sequence: Synthetic oligonucleotide
cttcggtagtagccaatttggt

SEQ ID NO: 1297 - DNA, 22 bp, Artificial Sequence
  Description of Artificial Sequence: Synthetic oligonucleotide
ttcggtagtagccaatttggtc

SEQ ID NO: 1298 - DNA, 22 bp, Artificial Sequence
  Description of Artificial Sequence: Synthetic oligonucleotide
tcggtagtagccaatttggtca

SEQ ID NO: 1299 - DNA, 22 bp, Artificial Sequence
  Description of Artificial Sequence: Synthetic oligonucleotide
cggtagtagccaatttggtcat

SEQ ID NO: 1300 - DNA, 22 bp, Artificial Sequence
  Description of Artificial Sequence: Synthetic oligonucleotide
ggtagtagccaatttggtcatc

SEQ ID NO: 1301 - DNA, 22 bp, Artificial Sequence
  Description of Artificial Sequence: Synthetic oligonucleotide
gtagtagccaatttggtcatct

SEQ ID NO: 1302 - DNA, 22 bp, Artificial Sequence
  Description of Artificial Sequence: Synthetic oligonucleotide
tagtagccaatttggtcatctg

SEQ ID NO: 1303 - DNA, 22 bp, Artificial Sequence
  Description of Artificial Sequence: Synthetic oligonucleotide
gctcttcggtagtagccaattt

SEQ ID NO: 1304 - DNA, 22 bp, Artificial Sequence
  Description of Artificial Sequence: Synthetic oligonucleotide
ctcttcggtagtagccaatttg

SEQ ID NO: 1305 - DNA, 22 bp, Artificial Sequence
  Description of Artificial Sequence: Synthetic oligonucleotide
attccaagaatgttctgttatc

SEQ ID NO: 1306 - DNA, 22 bp, Artificial Sequence
  Description of Artificial Sequence: Synthetic oligonucleotide
catcaagcctacaagacaagcc

SEQ ID NO: 1307 - DNA, 22 bp, Artificial Sequence
  Description of Artificial Sequence: Synthetic oligonucleotide
acatcaagcctacaagacaagc

SEQ ID NO: 1308 - DNA, 22 bp, Artificial Sequence
  Description of Artificial Sequence: Synthetic oligonucleotide
agcctacaagacaagccattgc

SEQ ID NO: 1309 - DNA, 22 bp, Artificial Sequence
  Description of Artificial Sequence: Synthetic oligonucleotide
aagcctacaagacaagccattg

SEQ ID NO: 1310 - DNA, 22 bp, Artificial Sequence
  Description of Artificial Sequence: Synthetic oligonucleotide
caagcctacaagacaagccatt

SEQ ID NO: 1311 - DNA, 22 bp, Artificial Sequence
  Description of Artificial Sequence: Synthetic oligonucleotide
tcaagcctacaagacaagccat

SEQ ID NO: 1312 - DNA, 22 bp, Artificial Sequence
  Description of Artificial Sequence: Synthetic oligonucleotide
atcaagcctacaagacaagcca

SEQ ID NO: 1313 - DNA, 22 bp, Artificial Sequence
  Description of Artificial Sequence: Synthetic oligonucleotide
caacactgaggtgtgtaggtgc

SEQ ID NO: 1314 - DNA, 22 bp, Artificial Sequence
  Description of Artificial Sequence: Synthetic oligonucleotide
acactgaggtgtgtaggtgcct

SEQ ID NO: 1315 - DNA, 22 bp, Artificial Sequence
  Description of Artificial Sequence: Synthetic oligonucleotide
aacactgaggtgtgtaggtgcc

SEQ ID NO: 1316 - DNA, 22 bp, Artificial Sequence
  Description of Artificial Sequence: Synthetic oligonucleotide
actgaggtgtgtaggtgcctgt

SEQ ID NO: 1317 - DNA, 22 bp, Artificial Sequence
  Description of Artificial Sequence: Synthetic oligonucleotide
cactgaggtgtgtaggtgcctg

SEQ ID NO: 1318 - DNA, 22 bp, Artificial Sequence
  Description of Artificial Sequence: Synthetic oligonucleotide
tgaggtgtgtaggtgcctgtgt

SEQ ID NO: 1319 - DNA, 22 bp, Artificial Sequence
  Description of Artificial Sequence: Synthetic oligonucleotide
ctgaggtgtgtaggtgcctgtg

SEQ ID NO: 1320 - DNA, 22 bp, Artificial Sequence
  Description of Artificial Sequence: Synthetic oligonucleotide
aggtgtgtaggtgcctgtgtag

SEQ ID NO: 1321 - DNA, 22 bp, Artificial Sequence
  Description of Artificial Sequence: Synthetic oligonucleotide
gaggtgtgtaggtgcctgtgta

SEQ ID NO: 1322 - DNA, 22 bp, Artificial Sequence
  Description of Artificial Sequence: Synthetic oligonucleotide
tgtagttacgagaattcattct

SEQ ID NO: 1323 - DNA, 22 bp, Artificial Sequence
  Description of Artificial Sequence: Synthetic oligonucleotide
tacgagaattcattctgcacaa

SEQ ID NO: 1324 - DNA, 22 bp, Artificial Sequence
  Description of Artificial Sequence: Synthetic oligonucleotide
ttacgagaattcattctgcaca

SEQ ID NO: 1325 - DNA, 22 bp, Artificial Sequence
  Description of Artificial Sequence: Synthetic oligonucleotide
cgagaattcattctgcacaaga

SEQ ID NO: 1326 - DNA, 22 bp, Artificial Sequence
  Description of Artificial Sequence: Synthetic oligonucleotide
tagttacgagaattcattctgc

SEQ ID NO: 1327 - DNA, 22 bp, Artificial Sequence
  Description of Artificial Sequence: Synthetic oligonucleotide
gtagttacgagaattcattctg

SEQ ID NO: 1328 - DNA, 22 bp, Artificial Sequence
  Description of Artificial Sequence: Synthetic oligonucleotide
gttacgagaattcattctgcac

SEQ ID NO: 1329 - DNA, 22 bp, Artificial Sequence
  Description of Artificial Sequence: Synthetic oligonucleotide
agttacgagaattcattctgca

SEQ ID NO: 1330 - DNA, 22 bp, Artificial Sequence
  Description of Artificial Sequence: Synthetic oligonucleotide
caaatgtgttgtctgtagtaat

SEQ ID NO: 1331 - DNA, 22 bp, Artificial Sequence
  Description of Artificial Sequence: Synthetic oligonucleotide
acaaatgtgttgtctgtagtaa

SEQ ID NO: 1332 - DNA, 22 bp, Artificial Sequence
  Description of Artificial Sequence: Synthetic oligonucleotide
ttgctctcaagctggttcaatc

SEQ ID NO: 1333 - DNA, 22 bp, Artificial Sequence
  Description of Artificial Sequence: Synthetic oligonucleotide
tttgctctcaagctggttcaat

SEQ ID NO: 1334 - DNA, 22 bp, Artificial Sequence
  Description of Artificial Sequence: Synthetic oligonucleotide
tctcaagctggttcaatctgtc

SEQ ID NO: 1335 - DNA, 22 bp, Artificial Sequence
  Description of Artificial Sequence: Synthetic oligonucleotide
ctctcaagctggttcaatctgt

SEQ ID NO: 1336 - DNA, 22 bp, Artificial Sequence
  Description of Artificial Sequence: Synthetic oligonucleotide
gctctcaagctggttcaatctg

SEQ ID NO: 1337 - DNA, 22 bp, Artificial Sequence
  Description of Artificial Sequence: Synthetic oligonucleotide
tgctctcaagctggttcaatct

SEQ ID NO: 1338 - DNA, 22 bp, Artificial Sequence
  Description of Artificial Sequence: Synthetic oligonucleotide
tgttgttggcctttaccagaca

SEQ ID NO: 1339 - DNA, 22 bp, Artificial Sequence
  Description of Artificial Sequence: Synthetic oligonucleotide
tcgtaacaatcaaagtacttat

SEQ ID NO: 1340 - DNA, 22 bp, Artificial Sequence
  Description of Artificial Sequence: Synthetic oligonucleotide
cgtaacaatcaaagtacttatc

SEQ ID NO: 1341 - DNA, 22 bp, Artificial Sequence
  Description of Artificial Sequence: Synthetic oligonucleotide
gtaacaatcaaagtacttatca

SEQ ID NO: 1342 - DNA, 22 bp, Artificial Sequence
  Description of Artificial Sequence: Synthetic oligonucleotide
taacaatcaaagtacttatcaa

SEQ ID NO: 1343 - DNA, 22 bp, Artificial Sequence
  Description of Artificial Sequence: Synthetic oligonucleotide
aacaatcaaagtacttatcaac

SEQ ID NO: 1344 - DNA, 22 bp, Artificial Sequence
  Description of Artificial Sequence: Synthetic oligonucleotide
acaatcaaagtacttatcaaca

SEQ ID NO: 1345 - DNA, 22 bp, Artificial Sequence
  Description of Artificial Sequence: Synthetic oligonucleotide
caatcaaagtacttatcaacaa

SEQ ID NO: 1346 - DNA, 22 bp, Artificial Sequence
  Description of Artificial Sequence: Synthetic oligonucleotide
aatcaaagtacttatcaacaac

SEQ ID NO: 1347 - DNA, 22 bp, Artificial Sequence
  Description of Artificial Sequence: Synthetic oligonucleotide
atcaaagtacttatcaacaact

SEQ ID NO: 1348 - DNA, 22 bp, Artificial Sequence
  Description of Artificial Sequence: Synthetic oligonucleotide
tcaaagtacttatcaacaactt

SEQ ID NO: 1349 - DNA, 22 bp, Artificial Sequence
  Description of Artificial Sequence: Synthetic oligonucleotide
ttagacacagcaaagtcataga

SEQ ID NO: 1350 - DNA, 22 bp, Artificial Sequence
  Description of Artificial Sequence: Synthetic oligonucleotide
cccttagacacagcaaagtcat

SEQ ID NO: 1351 - DNA, 22 bp, Artificial Sequence
  Description of Artificial Sequence: Synthetic oligonucleotide
gacacagcaaagtcatagaagt

SEQ ID NO: 1352 - DNA, 22 bp, Artificial Sequence
  Description of Artificial Sequence: Synthetic oligonucleotide
acacagcaaagtcatagaagtc

SEQ ID NO: 1353 - DNA, 22 bp, Artificial Sequence
  Description of Artificial Sequence: Synthetic oligonucleotide
tagacacagcaaagtcatagaa

SEQ ID NO: 1354 - DNA, 22 bp, Artificial Sequence
  Description of Artificial Sequence: Synthetic oligonucleotide
agacacagcaaagtcatagaag

SEQ ID NO: 1355 - DNA, 22 bp, Artificial Sequence
  Description of Artificial Sequence: Synthetic oligonucleotide
acccttagacacagcaaagtca

SEQ ID NO: 1356 - DNA, 22 bp, Artificial Sequence
  Description of Artificial Sequence: Synthetic oligonucleotide
agcattccaagaatgttctgtt

SEQ ID NO: 1357 - DNA, 22 bp, Artificial Sequence
  Description of Artificial Sequence: Synthetic oligonucleotide
ttggaagcgctctgaaaaacag

SEQ ID NO: 1358 - DNA, 22 bp, Artificial Sequence
  Description of Artificial Sequence: Synthetic oligonucleotide
tttggaagcgctctgaaaaaca

SEQ ID NO: 1359 - DNA, 22 bp, Artificial Sequence
  Description of Artificial Sequence: Synthetic oligonucleotide
ggaagcgctctgaaaaacagca

SEQ ID NO: 1360 - DNA, 22 bp, Artificial Sequence
  Description of Artificial Sequence: Synthetic oligonucleotide
tggaagcgctctgaaaaacagc

SEQ ID NO: 1361 - DNA, 22 bp, Artificial Sequence
  Description of Artificial Sequence: Synthetic oligonucleotide
cacactgaattgaaatattctg

SEQ ID NO: 1362 - DNA, 22 bp, Artificial Sequence
  Description of Artificial Sequence: Synthetic oligonucleotide
gactcctgttgtactagatatt

SEQ ID NO: 1363 - DNA, 22 bp, Artificial Sequence
  Description of Artificial Sequence: Synthetic oligonucleotide
cataaaccaaagcactcacagt

SEQ ID NO: 1364 - DNA, 22 bp, Artificial Sequence
  Description of Artificial Sequence: Synthetic oligonucleotide
cggagttgatcacaactacagc

SEQ ID NO: 1365 - DNA, 22 bp, Artificial Sequence
  Description of Artificial Sequence: Synthetic oligonucleotide
ggagttgatcacaactacagcc

SEQ ID NO: 1366 - DNA, 22 bp, Artificial Sequence
  Description of Artificial Sequence: Synthetic oligonucleotide
gagttgatcacaactacagcca

SEQ ID NO: 1367 - DNA, 22 bp, Artificial Sequence
  Description of Artificial Sequence: Synthetic oligonucleotide
agttgatcacaactacagccat

SEQ ID NO: 1368 - DNA, 22 bp, Artificial Sequence
  Description of Artificial Sequence: Synthetic oligonucleotide
gttgatcacaactacagccata

SEQ ID NO: 1369 - DNA, 22 bp, Artificial Sequence
  Description of Artificial Sequence: Synthetic oligonucleotide
ttgatcacaactacagccataa

SEQ ID NO: 1370 - DNA, 22 bp, Artificial Sequence
  Description of Artificial Sequence: Synthetic oligonucleotide
tgatcacaactacagccataac

SEQ ID NO: 1371 - DNA, 22 bp, Artificial Sequence
  Description of Artificial Sequence: Synthetic oligonucleotide
gatcacaactacagccataacc

SEQ ID NO: 1372 - DNA, 22 bp, Artificial Sequence
  Description of Artificial Sequence: Synthetic oligonucleotide
cgcggagttgatcacaactaca

SEQ ID NO: 1373 - DNA, 22 bp, Artificial Sequence
  Description of Artificial Sequence: Synthetic oligonucleotide
gcggagttgatcacaactacag

SEQ ID NO: 1374 - DNA, 22 bp, Artificial Sequence
  Description of Artificial Sequence: Synthetic oligonucleotide
aaggtcagtctcagtccaacat

SEQ ID NO: 1375 - DNA, 22 bp, Artificial Sequence
  Description of Artificial Sequence: Synthetic oligonucleotide
tttgataataaagaactgactt

SEQ ID NO: 1376 - DNA, 22 bp, Artificial Sequence
  Description of Artificial Sequence: Synthetic oligonucleotide
cttcagacataaaaacattgtt

SEQ ID NO: 1377 - DNA, 22 bp, Artificial Sequence
  Description of Artificial Sequence: Synthetic oligonucleotide
gcttcagacataaaaacattgt

SEQ ID NO: 1378 - DNA, 22 bp, Artificial Sequence
  Description of Artificial Sequence: Synthetic oligonucleotide
tacactatgcgagcagaagggt

SEQ ID NO: 1379 - DNA, 22 bp, Artificial Sequence
  Description of Artificial Sequence: Synthetic oligonucleotide
tatacactatgcgagcagaagg

SEQ ID NO: 1380 - DNA, 22 bp, Artificial Sequence
  Description of Artificial Sequence: Synthetic oligonucleotide
gtatacactatgcgagcagaag

SEQ ID NO: 1381 - DNA, 22 bp, Artificial Sequence
  Description of Artificial Sequence: Synthetic oligonucleotide
cgcttaacaaagcactcgtgga

SEQ ID NO: 1382 - DNA, 22 bp, Artificial Sequence
  Description of Artificial Sequence: Synthetic oligonucleotide
gcttaacaaagcactcgtggac

SEQ ID NO: 1383 - DNA, 22 bp, Artificial Sequence
  Description of Artificial Sequence: Synthetic oligonucleotide
tttccaacttacgttgcatggc

SEQ ID NO: 1384 - DNA, 22 bp, Artificial Sequence
  Description of Artificial Sequence: Synthetic oligonucleotide
atggctagtgtaactagcaaga

SEQ ID NO: 1385 - DNA, 22 bp, Artificial Sequence
  Description of Artificial Sequence: Synthetic oligonucleotide
gatggctagtgtaactagcaag

SEQ ID NO: 1386 - DNA, 22 bp, Artificial Sequence
  Description of Artificial Sequence: Synthetic oligonucleotide
agtgtaactagcaagaatacca

SEQ ID NO: 1387 - DNA, 22 bp, Artificial Sequence
  Description of Artificial Sequence: Synthetic oligonucleotide
tagtgtaactagcaagaatacc

SEQ ID NO: 1388 - DNA, 22 bp, Artificial Sequence
  Description of Artificial Sequence: Synthetic oligonucleotide
tgtaactagcaagaataccacg

SEQ ID NO: 1389 - DNA, 22 bp, Artificial Sequence
  Description of Artificial Sequence: Synthetic oligonucleotide
gtgtaactagcaagaataccac

SEQ ID NO: 1390 - DNA, 22 bp, Artificial Sequence
  Description of Artificial Sequence: Synthetic oligonucleotide
ggctagtgtaactagcaagaat

SEQ ID NO: 1391 - DNA, 22 bp, Artificial Sequence
  Description of Artificial Sequence: Synthetic oligonucleotide
ctagtgtaactagcaagaatac

SEQ ID NO: 1392 - DNA, 22 bp, Artificial Sequence
  Description of Artificial Sequence: Synthetic oligonucleotide
gctagtgtaactagcaagaata

SEQ ID NO: 1393 - DNA, 22 bp, Artificial Sequence
  Description of Artificial Sequence: Synthetic oligonucleotide
cctttccacaaaaatcaactct

SEQ ID NO: 1394 - DNA, 22 bp, Artificial Sequence
  Description of Artificial Sequence: Synthetic oligonucleotide
tttgattgtccaagtacacact

SEQ ID NO: 1395 - DNA, 22 bp, Artificial Sequence
  Description of Artificial Sequence: Synthetic oligonucleotide
tagccctttccacaaaaatcaa

SEQ ID NO: 1396 - DNA, 22 bp, Artificial Sequence
  Description of Artificial Sequence: Synthetic oligonucleotide
agccctttccacaaaaatcaac

SEQ ID NO: 1397 - DNA, 22 bp, Artificial Sequence
  Description of Artificial Sequence: Synthetic oligonucleotide
gccctttccacaaaaatcaact

SEQ ID NO: 1398 - DNA, 22 bp, Artificial Sequence
  Description of Artificial Sequence: Synthetic oligonucleotide
ccctttccacaaaaatcaactc

SEQ ID NO: 1399 - DNA, 22 bp, Artificial Sequence
  Description of Artificial Sequence: Synthetic oligonucleotide
tgctgatgatcggctgcaacac

SEQ ID NO: 1400 - DNA, 22 bp, Artificial Sequence
  Description of Artificial Sequence: Synthetic oligonucleotide
gctgatgatcggctgcaacacg

SEQ ID NO: 1401 - DNA, 22 bp, Artificial Sequence
  Description of Artificial Sequence: Synthetic oligonucleotide
ctgatgatcggctgcaacacgg

SEQ ID NO: 1402 - DNA, 22 bp, Artificial Sequence
  Description of Artificial Sequence: Synthetic oligonucleotide
tgatgatcggctgcaacacgga

SEQ ID NO: 1403 - DNA, 22 bp, Artificial Sequence
  Description of Artificial Sequence: Synthetic oligonucleotide
gatgatcggctgcaacacggac

SEQ ID NO: 1404 - DNA, 22 bp, Artificial Sequence
  Description of Artificial Sequence: Synthetic oligonucleotide
atgatcggctgcaacacggacg

SEQ ID NO: 1405 - DNA, 22 bp, Artificial Sequence
  Description of Artificial Sequence: Synthetic oligonucleotide
acaccacagaaaactcctggta

SEQ ID NO: 1406 - DNA, 22 bp, Artificial Sequence
  Description of Artificial Sequence: Synthetic oligonucleotide
acagatagagacaccagctacg

SEQ ID NO: 1407 - DNA, 22 bp, Artificial Sequence
  Description of Artificial Sequence: Synthetic oligonucleotide
tacagatagagacaccagctac

SEQ ID NO: 1408 - DNA, 22 bp, Artificial Sequence
  Description of Artificial Sequence: Synthetic oligonucleotide
agacaccagctacggtgcgagc

SEQ ID NO: 1409 - DNA, 22 bp, Artificial Sequence
  Description of Artificial Sequence: Synthetic oligonucleotide
gagacaccagctacggtgcgag

SEQ ID NO: 1410 - DNA, 22 bp, Artificial Sequence
  Description of Artificial Sequence: Synthetic oligonucleotide
agagacaccagctacggtgcga

SEQ ID NO: 1411 - DNA, 22 bp, Artificial Sequence
  Description of Artificial Sequence: Synthetic oligonucleotide
tagagacaccagctacggtgcg

SEQ ID NO: 1412 - DNA, 22 bp, Artificial Sequence
  Description of Artificial Sequence: Synthetic oligonucleotide
atagagacaccagctacggtgc

SEQ ID NO: 1413 - DNA, 22 bp, Artificial Sequence
  Description of Artificial Sequence: Synthetic oligonucleotide
gatagagacaccagctacggtg

SEQ ID NO: 1414 - DNA, 22 bp, Artificial Sequence
  Description of Artificial Sequence: Synthetic oligonucleotide
agatagagacaccagctacggt

SEQ ID NO: 1415 - DNA, 22 bp, Artificial Sequence
  Description of Artificial Sequence: Synthetic oligonucleotide
cagatagagacaccagctacgg

SEQ ID NO: 1416 - DNA, 22 bp, Artificial Sequence
  Description of Artificial Sequence: Synthetic oligonucleotide
ctccctcagttgcaacccatat

SEQ ID NO: 1417 - DNA, 22 bp, Artificial Sequence
  Description of Artificial Sequence: Synthetic oligonucleotide
tccctcagttgcaacccatatg

SEQ ID NO: 1418 - DNA, 22 bp, Artificial Sequence
  Description of Artificial Sequence: Synthetic oligonucleotide
ccctcagttgcaacccatatga

SEQ ID NO: 1419 - DNA, 22 bp, Artificial Sequence
  Description of Artificial Sequence: Synthetic oligonucleotide
cctcagttgcaacccatatgat

SEQ ID NO: 1420 - DNA, 22 bp, Artificial Sequence
  Description of Artificial Sequence: Synthetic oligonucleotide
aaggctccctcagttgcaaccc

SEQ ID NO: 1421 - DNA, 22 bp, Artificial Sequence
  Description of Artificial Sequence: Synthetic oligonucleotide
aggctccctcagttgcaaccca

SEQ ID NO: 1422 - DNA, 22 bp, Artificial Sequence
  Description of Artificial Sequence: Synthetic oligonucleotide
ggctccctcagttgcaacccat

SEQ ID NO: 1423 - DNA, 22 bp, Artificial Sequence
  Description of Artificial Sequence: Synthetic oligonucleotide
gctccctcagttgcaacccata

SEQ ID NO: 1424 - DNA, 22 bp, Artificial Sequence
  Description of Artificial Sequence: Synthetic oligonucleotide
tcaaggctccctcagttgcaac

SEQ ID NO: 1425 - DNA, 22 bp, Artificial Sequence
  Description of Artificial Sequence: Synthetic oligonucleotide
caaggctccctcagttgcaacc

SEQ ID NO: 1426 - DNA, 22 bp, Artificial Sequence
  Description of Artificial Sequence: Synthetic oligonucleotide
acatatctaaaacggcaattcc

SEQ ID NO: 1427 - DNA, 22 bp, Artificial Sequence
  Description of Artificial Sequence: Synthetic oligonucleotide
aggtcagtctcagtccaacatt

SEQ ID NO: 1428 - DNA, 22 bp, Artificial Sequence
  Description of Artificial Sequence: Synthetic oligonucleotide
ggtcagtctcagtccaacattt

SEQ ID NO: 1429 - DNA, 22 bp, Artificial Sequence
  Description of Artificial Sequence: Synthetic oligonucleotide
tgtctgtagtaatgatttgtgg

SEQ ID NO: 1430 - DNA, 22 bp, Artificial Sequence
  Description of Artificial Sequence: Synthetic oligonucleotide
ttgtctgtagtaatgatttgtg

SEQ ID NO: 1431 - DNA, 22 bp, Artificial Sequence
  Description of Artificial Sequence: Synthetic oligonucleotide
acactatgcgagcagaagggta

SEQ ID NO: 1432 - DNA, 22 bp, Artificial Sequence
  Description of Artificial Sequence: Synthetic oligonucleotide
atacactatgcgagcagaaggg

SEQ ID NO: 1433 - DNA, 22 bp, Artificial Sequence
  Description of Artificial Sequence: Synthetic oligonucleotide
ctgtatacactatgcgagcaga

SEQ ID NO: 1434 - DNA, 22 bp, Artificial Sequence
  Description of Artificial Sequence: Synthetic oligonucleotide
gctgtatacactatgcgagcag

SEQ ID NO: 1435 - DNA, 22 bp, Artificial Sequence
  Description of Artificial Sequence: Synthetic oligonucleotide
ggtggttggtaaagaacatcag

SEQ ID NO: 1436 - DNA, 22 bp, Artificial Sequence
  Description of Artificial Sequence: Synthetic oligonucleotide
aaaccaacactaccacatgaac

SEQ ID NO: 1437 - DNA, 22 bp, Artificial Sequence
  Description of Artificial Sequence: Synthetic oligonucleotide
aaaaccaacactaccacatgaa

SEQ ID NO: 1438 - DNA, 22 bp, Artificial Sequence
  Description of Artificial Sequence: Synthetic oligonucleotide
acactaccacatgaaccattaa

SEQ ID NO: 1439 - DNA, 22 bp, Artificial Sequence
  Description of Artificial Sequence: Synthetic oligonucleotide
aacactaccacatgaaccatta

SEQ ID NO: 1440 - DNA, 22 bp, Artificial Sequence
  Description of Artificial Sequence: Synthetic oligonucleotide
actaccacatgaaccattaagg

SEQ ID NO: 1441 - DNA, 22 bp, Artificial Sequence
  Description of Artificial Sequence: Synthetic oligonucleotide
cactaccacatgaaccattaag

SEQ ID NO: 1442 - DNA, 22 bp, Artificial Sequence
  Description of Artificial Sequence: Synthetic oligonucleotide
accaacactaccacatgaacca

SEQ ID NO: 1443 - DNA, 22 bp, Artificial Sequence
  Description of Artificial Sequence: Synthetic oligonucleotide
aaccaacactaccacatgaacc

SEQ ID NO: 1444 - DNA, 22 bp, Artificial Sequence
  Description of Artificial Sequence: Synthetic oligonucleotide
caacactaccacatgaaccatt

SEQ ID NO: 1445 - DNA, 22 bp, Artificial Sequence
  Description of Artificial Sequence: Synthetic oligonucleotide
ccaacactaccacatgaaccat

SEQ ID NO: 1446 - DNA, 22 bp, Artificial Sequence
  Description of Artificial Sequence: Synthetic oligonucleotide
atcttacctttcggtcacaccc

SEQ ID NO: 1447 - DNA, 22 bp, Artificial Sequence
  Description of Artificial Sequence: Synthetic oligonucleotide
tcttacctttcggtcacacccg

SEQ ID NO: 1448 - DNA, 22 bp, Artificial Sequence
  Description of Artificial Sequence: Synthetic oligonucleotide
cttacctttcggtcacacccgg

SEQ ID NO: 1449 - DNA, 22 bp, Artificial Sequence
  Description of Artificial Sequence: Synthetic oligonucleotide
ttacctttcggtcacacccgga

SEQ ID NO: 1450 - DNA, 22 bp, Artificial Sequence
  Description of Artificial Sequence: Synthetic oligonucleotide
ctccatcttacctttcggtcac

SEQ ID NO: 1451 - DNA, 22 bp, Artificial Sequence
  Description of Artificial Sequence: Synthetic oligonucleotide
tccatcttacctttcggtcaca

SEQ ID NO: 1452 - DNA, 22 bp, Artificial Sequence
  Description of Artificial Sequence: Synthetic oligonucleotide
ccatcttacctttcggtcacac

SEQ ID NO: 1453 - DNA, 22 bp, Artificial Sequence
  Description of Artificial Sequence: Synthetic oligonucleotide
catcttacctttcggtcacacc

SEQ ID NO: 1454 - DNA, 22 bp, Artificial Sequence
  Description of Artificial Sequence: Synthetic oligonucleotide
ctctccatcttacctttcggtc

SEQ ID NO: 1455 - DNA, 22 bp, Artificial Sequence
  Description of Artificial Sequence: Synthetic oligonucleotide
tctccatcttacctttcggtca

SEQ ID NO: 1456 - DNA, 22 bp, Artificial Sequence
  Description of Artificial Sequence: Synthetic oligonucleotide
tcccctactgctgcctggagtt

SEQ ID NO: 1457 - DNA, 22 bp, Artificial Sequence
  Description of Artificial Sequence: Synthetic oligonucleotide
tggctagtgtaactagcaagaa

SEQ ID NO: 1458 - DNA, 22 bp, Artificial Sequence
  Description of Artificial Sequence: Synthetic oligonucleotide
ttcccctactgctgcctggagt

SEQ ID NO: 1459 - DNA, 22 bp, Artificial Sequence
  Description of Artificial Sequence: Synthetic oligonucleotide
catccaaacagttaacacaatt

SEQ ID NO: 1460 - DNA, 22 bp, Artificial Sequence
  Description of Artificial Sequence: Synthetic oligonucleotide
tcatccaaacagttaacacaat

SEQ ID NO: 1461 - DNA, 22 bp, Artificial Sequence
  Description of Artificial Sequence: Synthetic oligonucleotide
ctactgctgcctggagttgaat

SEQ ID NO: 1462 - DNA, 22 bp, Artificial Sequence
  Description of Artificial Sequence: Synthetic oligonucleotide
cctactgctgcctggagttgaa

SEQ ID NO: 1463 - DNA, 22 bp, Artificial Sequence
  Description of Artificial Sequence: Synthetic oligonucleotide
atcatcatcacaacaattgtat

SEQ ID NO: 1464 - DNA, 22 bp, Artificial Sequence
  Description of Artificial Sequence: Synthetic oligonucleotide
tcatcatcacaacaattgtatg

SEQ ID NO: 1465 - DNA, 22 bp, Artificial Sequence
  Description of Artificial Sequence: Synthetic oligonucleotide
tcatcacaacaattgtatgtga

SEQ ID NO: 1466 - DNA, 22 bp, Artificial Sequence
  Description of Artificial Sequence: Synthetic oligonucleotide
catcacaacaattgtatgtgac

SEQ ID NO: 1467 - DNA, 22 bp, Artificial Sequence
  Description of Artificial Sequence: Synthetic oligonucleotide
catcatcacaacaattgtatgt

SEQ ID NO: 1468 - DNA, 22 bp, Artificial Sequence
  Description of Artificial Sequence: Synthetic oligonucleotide
atcatcacaacaattgtatgtg

SEQ ID NO: 1469 - DNA, 22 bp, Artificial Sequence
  Description of Artificial Sequence: Synthetic oligonucleotide
tagtcataatcgctgatagcag

SEQ ID NO: 1470 - DNA, 22 bp, Artificial Sequence
  Description of Artificial Sequence: Synthetic oligonucleotide
agtcataatcgctgatagcagc

SEQ ID NO: 1471 - DNA, 22 bp, Artificial Sequence
  Description of Artificial Sequence: Synthetic oligonucleotide
tgaattgaaatattctggttct

SEQ ID NO: 1472 - DNA, 22 bp, Artificial Sequence
  Description of Artificial Sequence: Synthetic oligonucleotide
actgaattgaaatattctggtt

SEQ ID NO: 1473 - DNA, 22 bp, Artificial Sequence
  Description of Artificial Sequence: Synthetic oligonucleotide
cactgaattgaaatattctggt

SEQ ID NO: 1474 - DNA, 22 bp, Artificial Sequence
  Description of Artificial Sequence: Synthetic oligonucleotide
acactgaattgaaatattctgg

SEQ ID NO: 1475 - DNA, 22 bp, Artificial Sequence
  Description of Artificial Sequence: Synthetic oligonucleotide
gtcatgattgcatcacaactag

SEQ ID NO: 1476 - DNA, 22 bp, Artificial Sequence
  Description of Artificial Sequence: Synthetic oligonucleotide
tcatgattgcatcacaactagc

SEQ ID NO: 1477 - DNA, 22 bp, Artificial Sequence
  Description of Artificial Sequence: Synthetic oligonucleotide
tagtcatgattgcatcacaact

SEQ ID NO: 1478 - DNA, 22 bp, Artificial Sequence
  Description of Artificial Sequence: Synthetic oligonucleotide
agtcatgattgcatcacaacta

SEQ ID NO: 1479 - DNA, 22 bp, Artificial Sequence
  Description of Artificial Sequence: Synthetic oligonucleotide
ctagtcatgattgcatcacaac

SEQ ID NO: 1480 - DNA, 22 bp, Artificial Sequence
  Description of Artificial Sequence: Synthetic oligonucleotide
taaaaattgtacattcagcagc

SEQ ID NO: 1481 - DNA, 22 bp, Artificial Sequence
  Description of Artificial Sequence: Synthetic oligonucleotide
ttaaaaattgtacattcagcag

SEQ ID NO: 1482 - DNA, 22 bp, Artificial Sequence
  Description of Artificial Sequence: Synthetic oligonucleotide
atcattgagaaatgtttacgca

SEQ ID NO: 1483 - DNA, 22 bp, Artificial Sequence
  Description of Artificial Sequence: Synthetic oligonucleotide
taataagaaagcgttcgtgatg

SEQ ID NO: 1484 - DNA, 22 bp, Artificial Sequence
  Description of Artificial Sequence: Synthetic oligonucleotide
tgtaataagaaagcgttcgtga

SEQ ID NO: 1485 - DNA, 22 bp, Artificial Sequence
  Description of Artificial Sequence: Synthetic oligonucleotide
gtaataagaaagcgttcgtgat

SEQ ID NO: 1486 - DNA, 22 bp, Artificial Sequence
  Description of Artificial Sequence: Synthetic oligonucleotide
tttgtaataagaaagcgttcgt

SEQ ID NO: 1487 - DNA, 22 bp, Artificial Sequence
  Description of Artificial Sequence: Synthetic oligonucleotide
aatttgtaataagaaagcgttc

SEQ ID NO: 1488 - DNA, 22 bp, Artificial Sequence
  Description of Artificial Sequence: Synthetic oligonucleotide
atttgtaataagaaagcgttcg

SEQ ID NO: 1489 - DNA, 22 bp, Artificial Sequence
  Description of Artificial Sequence: Synthetic oligonucleotide
ccaatttgtaataagaaagcgt

SEQ ID NO: 1490 - DNA, 22 bp, Artificial Sequence
  Description of Artificial Sequence: Synthetic oligonucleotide
caatttgtaataagaaagcgtt

SEQ ID NO: 1491 - DNA, 22 bp, Artificial Sequence
  Description of Artificial Sequence: Synthetic oligonucleotide
aaaacccatcatagagatgagt

SEQ ID NO: 1492 - DNA, 22 bp, Artificial Sequence
  Description of Artificial Sequence: Synthetic oligonucleotide
aaacccatcatagagatgagtc

SEQ ID NO: 1493 - DNA, 22 bp, Artificial Sequence
  Description of Artificial Sequence: Synthetic oligonucleotide
ttaaaacccatcatagagatga

SEQ ID NO: 1494 - DNA, 22 bp, Artificial Sequence
  Description of Artificial Sequence: Synthetic oligonucleotide
taaaacccatcatagagatgag

SEQ ID NO: 1495 - DNA, 22 bp, Artificial Sequence
  Description of Artificial Sequence: Synthetic oligonucleotide
tttaaaacccatcatagagatg

SEQ ID NO: 1496 - DNA, 22 bp, Artificial Sequence
  Description of Artificial Sequence: Synthetic oligonucleotide
aacaccattacgggcatttcta

SEQ ID NO: 1497 - DNA, 22 bp, Artificial Sequence
  Description of Artificial Sequence: Synthetic oligonucleotide
acaccattacgggcatttctaa

SEQ ID NO: 1498 - DNA, 22 bp, Artificial Sequence
  Description of Artificial Sequence: Synthetic oligonucleotide
caccattacgggcatttctaaa

SEQ ID NO: 1499 - DNA, 22 bp, Artificial Sequence
  Description of Artificial Sequence: Synthetic oligonucleotide
tctggtaatttataattataat

SEQ ID NO: 1500 - DNA, 22 bp, Artificial Sequence
  Description of Artificial Sequence: Synthetic oligonucleotide
atctggtaatttataattataa

SEQ ID NO: 1501 - DNA, 22 bp, Artificial Sequence
  Description of Artificial Sequence: Synthetic oligonucleotide
tggtaatttataattataatca

SEQ ID NO: 1502 - DNA, 22 bp, Artificial Sequence
  Description of Artificial Sequence: Synthetic oligonucleotide
ctggtaatttataattataatc

SEQ ID NO: 1503 - DNA, 22 bp, Artificial Sequence
  Description of Artificial Sequence: Synthetic oligonucleotide
gtaatttataattataatcagc

SEQ ID NO: 1504 - DNA, 22 bp, Artificial Sequence
  Description of Artificial Sequence: Synthetic oligonucleotide
ggtaatttataattataatcag

SEQ ID NO: 1505 - DNA, 22 bp, Artificial Sequence
  Description of Artificial Sequence: Synthetic oligonucleotide
catctggtaatttataattata

SEQ ID NO: 1506 - DNA, 22 bp, Artificial Sequence
  Description of Artificial Sequence: Synthetic oligonucleotide
tcatctggtaatttataattat

SEQ ID NO: 1507 - DNA, 22 bp, Artificial Sequence
  Description of Artificial Sequence: Synthetic oligonucleotide
acggcaattccagtttgagcag

SEQ ID NO: 1508 - DNA, 22 bp, Artificial Sequence
  Description of Artificial Sequence: Synthetic oligonucleotide
cggcaattccagtttgagcaga

SEQ ID NO: 1509 - DNA, 22 bp, Artificial Sequence
  Description of Artificial Sequence: Synthetic oligonucleotide
ttacaagagtgagctgtttcag

SEQ ID NO: 1510 - DNA, 22 bp, Artificial Sequence
  Description of Artificial Sequence: Synthetic oligonucleotide
ctacagtactcagaatcaaaag

SEQ ID NO: 1511 - DNA, 22 bp, Artificial Sequence
  Description of Artificial Sequence: Synthetic oligonucleotide
tacagtactcagaatcaaaagt

SEQ ID NO: 1512 - DNA, 22 bp, Artificial Sequence
  Description of Artificial Sequence: Synthetic oligonucleotide
ttcagatttagccacattcaaa

SEQ ID NO: 1513 - DNA, 22 bp, Artificial Sequence
  Description of Artificial Sequence: Synthetic oligonucleotide
agcagcagatttcttagtgaca

SEQ ID NO: 1514 - DNA, 22 bp, Artificial Sequence
  Description of Artificial Sequence: Synthetic oligonucleotide
tcagtactagtgcctgtgccgc

SEQ ID NO: 1515 - DNA, 22 bp, Artificial Sequence
  Description of Artificial Sequence: Synthetic oligonucleotide
ctagtgcctgtgccgcacggtg

SEQ ID NO: 1516 - DNA, 22 bp, Artificial Sequence
  Description of Artificial Sequence: Synthetic oligonucleotide
actagtgcctgtgccgcacggt

SEQ ID NO: 1517 - DNA, 22 bp, Artificial Sequence
  Description of Artificial Sequence: Synthetic oligonucleotide
agtgcctgtgccgcacggtgta

SEQ ID NO: 1518 - DNA, 22 bp, Artificial Sequence
  Description of Artificial Sequence: Synthetic oligonucleotide
tagtgcctgtgccgcacggtgt

SEQ ID NO: 1519 - DNA, 22 bp, Artificial Sequence
  Description of Artificial Sequence: Synthetic oligonucleotide
agtactagtgcctgtgccgcac

SEQ ID NO: 1520 - DNA, 22 bp, Artificial Sequence
  Description of Artificial Sequence: Synthetic oligonucleotide
cagtactagtgcctgtgccgca

SEQ ID NO: 1521 - DNA, 22 bp, Artificial Sequence
  Description of Artificial Sequence: Synthetic oligonucleotide
tactagtgcctgtgccgcacgg

SEQ ID NO: 1522 - DNA, 22 bp, Artificial Sequence
  Description of Artificial Sequence: Synthetic oligonucleotide
gtactagtgcctgtgccgcacg

SEQ ID NO: 1523 - DNA, 22 bp, Artificial Sequence
  Description of Artificial Sequence: Synthetic oligonucleotide
ttgcgcttagcccaaagctcaa

SEQ ID NO: 1524 - DNA, 22 bp, Artificial Sequence
  Description of Artificial Sequence: Synthetic oligonucleotide
tgcgcttagcccaaagctcaaa

SEQ ID NO: 1525 - DNA, 22 bp, Artificial Sequence
  Description of Artificial Sequence: Synthetic oligonucleotide
ttagcccaaagctcaaatgcta

SEQ ID NO: 1526 - DNA, 22 bp, Artificial Sequence
  Description of Artificial Sequence: Synthetic oligonucleotide
tagcccaaagctcaaatgctac

SEQ ID NO: 1527 - DNA, 22 bp, Artificial Sequence
  Description of Artificial Sequence: Synthetic oligonucleotide
agcccaaagctcaaatgctaca

SEQ ID NO: 1528 - DNA, 22 bp, Artificial Sequence
  Description of Artificial Sequence: Synthetic oligonucleotide
gcccaaagctcaaatgctacat

SEQ ID NO: 1529 - DNA, 22 bp, Artificial Sequence
  Description of Artificial Sequence: Synthetic oligonucleotide
gcgcttagcccaaagctcaaat

SEQ ID NO: 1530 - DNA, 22 bp, Artificial Sequence
  Description of Artificial Sequence: Synthetic oligonucleotide
cgcttagcccaaagctcaaatg

SEQ ID NO: 1531 - DNA, 22 bp, Artificial Sequence
  Description of Artificial Sequence: Synthetic oligonucleotide
gcttagcccaaagctcaaatgc

SEQ ID NO: 1532 - DNA, 22 bp, Artificial Sequence
  Description of Artificial Sequence: Synthetic oligonucleotide
cttagcccaaagctcaaatgct

SEQ ID NO: 1533 - DNA, 22 bp, Artificial Sequence
  Description of Artificial Sequence: Synthetic oligonucleotide
gagacaaagtcattaagatctg

SEQ ID NO: 1534 - DNA, 22 bp, Artificial Sequence
  Description of Artificial Sequence: Synthetic oligonucleotide
gacaaagtcattaagatctgaa

SEQ ID NO: 1535 - DNA, 22 bp, Artificial Sequence
  Description of Artificial Sequence: Synthetic oligonucleotide
agacaaagtcattaagatctga

SEQ ID NO: 1536 - DNA, 22 bp, Artificial Sequence
  Description of Artificial Sequence: Synthetic oligonucleotide
tcttaccagtaccaggtggtcc

SEQ ID NO: 1537 - DNA, 22 bp, Artificial Sequence
  Description of Artificial Sequence: Synthetic oligonucleotide
gtaccaggtggtccctggagtg

SEQ ID NO: 1538 - DNA, 22 bp, Artificial Sequence
  Description of Artificial Sequence: Synthetic oligonucleotide
taccaggtggtccctggagtgt

SEQ ID NO: 1539 - DNA, 22 bp, Artificial Sequence
  Description of Artificial Sequence: Synthetic oligonucleotide
ttaccagtaccaggtggtccct

SEQ ID NO: 1540 - DNA, 22 bp, Artificial Sequence
  Description of Artificial Sequence: Synthetic oligonucleotide
taccagtaccaggtggtccctg

SEQ ID NO: 1541 - DNA, 22 bp, Artificial Sequence
  Description of Artificial Sequence: Synthetic oligonucleotide
accagtaccaggtggtccctgg

SEQ ID NO: 1542 - DNA, 22 bp, Artificial Sequence
  Description of Artificial Sequence: Synthetic oligonucleotide
ccagtaccaggtggtccctgga

SEQ ID NO: 1543 - DNA, 22 bp, Artificial Sequence
  Description of Artificial Sequence: Synthetic oligonucleotide
aagcatctatagctaaagacac

SEQ ID NO: 1544 - DNA, 22 bp, Artificial Sequence
  Description of Artificial Sequence: Synthetic oligonucleotide
gtaagcatctatagctaaagac

SEQ ID NO: 1545 - DNA, 22 bp, Artificial Sequence
  Description of Artificial Sequence: Synthetic oligonucleotide
taagcatctatagctaaagaca

SEQ ID NO: 1546 - DNA, 22 bp, Artificial Sequence
  Description of Artificial Sequence: Synthetic oligonucleotide
gggtaagcatctatagctaaag

SEQ ID NO: 1547 - DNA, 22 bp, Artificial Sequence
  Description of Artificial Sequence: Synthetic oligonucleotide
ggtaagcatctatagctaaaga

SEQ ID NO: 1548 - DNA, 22 bp, Artificial Sequence
  Description of Artificial Sequence: Synthetic oligonucleotide
tgcttacaaaggcacgctagta

SEQ ID NO: 1549 - DNA, 22 bp, Artificial Sequence
  Description of Artificial Sequence: Synthetic oligonucleotide
gcttacaaaggcacgctagtag

SEQ ID NO: 1550 - DNA, 22 bp, Artificial Sequence
  Description of Artificial Sequence: Synthetic oligonucleotide
tacaaaggcacgctagtagtcg

SEQ ID NO: 1551 - DNA, 22 bp, Artificial Sequence
  Description of Artificial Sequence: Synthetic oligonucleotide
acaaaggcacgctagtagtcgt

SEQ ID NO: 1552 - DNA, 22 bp, Artificial Sequence
  Description of Artificial Sequence: Synthetic oligonucleotide
cttacaaaggcacgctagtagt

SEQ ID NO: 1553 - DNA, 22 bp, Artificial Sequence
  Description of Artificial Sequence: Synthetic oligonucleotide
ttacaaaggcacgctagtagtc

SEQ ID NO: 1554 - DNA, 22 bp, Artificial Sequence
  Description of Artificial Sequence: Synthetic oligonucleotide
aaggcacgctagtagtcgtcgt

SEQ ID NO: 1555 - DNA, 22 bp, Artificial Sequence
  Description of Artificial Sequence: Synthetic oligonucleotide
aggcacgctagtagtcgtcgtc

SEQ ID NO: 1556 - DNA, 22 bp, Artificial Sequence
  Description of Artificial Sequence: Synthetic oligonucleotide
caaaggcacgctagtagtcgtc

SEQ ID NO: 1557 - DNA, 22 bp, Artificial Sequence
  Description of Artificial Sequence: Synthetic oligonucleotide
aaaggcacgctagtagtcgtcg

SEQ ID NO: 1558 - DNA, 22 bp, Artificial Sequence
  Description of Artificial Sequence: Synthetic oligonucleotide
gcgaaaacgtttatatagccca

SEQ ID NO: 1559 - DNA, 22 bp, Artificial Sequence
  Description of Artificial Sequence: Synthetic oligonucleotide
gaaaacgtttatatagcccatc

SEQ ID NO: 1560 - DNA, 22 bp, Artificial Sequence
  Description of Artificial Sequence: Synthetic oligonucleotide
cgaaaacgtttatatagcccat

SEQ ID NO: 1561 - DNA, 22 bp, Artificial Sequence
  Description of Artificial Sequence: Synthetic oligonucleotide
acacattgagcccacaatttag

SEQ ID NO: 1562 - DNA, 22 bp, Artificial Sequence
  Description of Artificial Sequence: Synthetic oligonucleotide
aacagctgtacctggtgcaact

SEQ ID NO: 1563 - DNA, 22 bp, Artificial Sequence
  Description of Artificial Sequence: Synthetic oligonucleotide
acagctgtacctggtgcaactc

SEQ ID NO: 1564 - DNA, 22 bp, Artificial Sequence
  Description of Artificial Sequence: Synthetic oligonucleotide
cagctgtacctggtgcaactcc

SEQ ID NO: 1565 - DNA, 22 bp, Artificial Sequence
  Description of Artificial Sequence: Synthetic oligonucleotide
tcacatttaggataatcccaac

SEQ ID NO: 1566 - DNA, 22 bp, Artificial Sequence
  Description of Artificial Sequence: Synthetic oligonucleotide
taggataatcccaacccataag

SEQ ID NO: 1567 - DNA, 22 bp, Artificial Sequence
  Description of Artificial Sequence: Synthetic oligonucleotide
aggataatcccaacccataagg

SEQ ID NO: 1568 - DNA, 22 bp, Artificial Sequence
  Description of Artificial Sequence: Synthetic oligonucleotide
tttaggataatcccaacccata

SEQ ID NO: 1569 - DNA, 22 bp, Artificial Sequence
  Description of Artificial Sequence: Synthetic oligonucleotide
ttaggataatcccaacccataa

SEQ ID NO: 1570 - DNA, 22 bp, Artificial Sequence
  Description of Artificial Sequence: Synthetic oligonucleotide
catttaggataatcccaaccca

SEQ ID NO: 1571 - DNA, 22 bp, Artificial Sequence
  Description of Artificial Sequence: Synthetic oligonucleotide
atttaggataatcccaacccat

SEQ ID NO: 1572 - DNA, 22 bp, Artificial Sequence
  Description of Artificial Sequence: Synthetic oligonucleotide
cacatttaggataatcccaacc

SEQ ID NO: 1573 - DNA, 22 bp, Artificial Sequence
  Description of Artificial Sequence: Synthetic oligonucleotide
acatttaggataatcccaaccc

SEQ ID NO: 1574 - DNA, 22 bp, Artificial Sequence
  Description of Artificial Sequence: Synthetic oligonucleotide
caacaatttcagcaggacaacg

SEQ ID NO: 1575 - DNA, 22 bp, Artificial Sequence
  Description of Artificial Sequence: Synthetic oligonucleotide
tatatgcgaaaagtgcatcttg

SEQ ID NO: 1576 - DNA, 22 bp, Artificial Sequence
  Description of Artificial Sequence: Synthetic oligonucleotide
atatgcgaaaagtgcatcttga

SEQ ID NO: 1577 - DNA, 22 bp, Artificial Sequence
  Description of Artificial Sequence: Synthetic oligonucleotide
cgaaaagtgcatcttgatcctc

SEQ ID NO: 1578 - DNA, 22 bp, Artificial Sequence
  Description of Artificial Sequence: Synthetic oligonucleotide
gaaaagtgcatcttgatcctca

SEQ ID NO: 1579 - DNA, 22 bp, Artificial Sequence
  Description of Artificial Sequence: Synthetic oligonucleotide
aaaagtgcatcttgatcctcat

SEQ ID NO: 1580 - DNA, 22 bp, Artificial Sequence
  Description of Artificial Sequence: Synthetic oligonucleotide
aaagtgcatcttgatcctcata

SEQ ID NO: 1581 - DNA, 22 bp, Artificial Sequence
  Description of Artificial Sequence: Synthetic oligonucleotide
tatgcgaaaagtgcatcttgat

SEQ ID NO: 1582 - DNA, 22 bp, Artificial Sequence
  Description of Artificial Sequence: Synthetic oligonucleotide
atgcgaaaagtgcatcttgatc

SEQ ID NO: 1583 - DNA, 22 bp, Artificial Sequence
  Description of Artificial Sequence: Synthetic oligonucleotide
tgcgaaaagtgcatcttgatcc

SEQ ID NO: 1584 - DNA, 22 bp, Artificial Sequence
  Description of Artificial Sequence: Synthetic oligonucleotide
gcgaaaagtgcatcttgatcct

SEQ ID NO: 1585 - DNA, 22 bp, Artificial Sequence
  Description of Artificial Sequence: Synthetic oligonucleotide
gtaacaaaggctgtccaccatg

SEQ ID NO: 1586 - DNA, 22 bp, Artificial Sequence
  Description of Artificial Sequence: Synthetic oligonucleotide
gagagcggtgaaccaagacgca

SEQ ID NO: 1587 - DNA, 22 bp, Artificial Sequence
  Description of Artificial Sequence: Synthetic oligonucleotide
gcggtgaaccaagacgcagtat

SEQ ID NO: 1588 - DNA, 22 bp, Artificial Sequence
  Description of Artificial Sequence: Synthetic oligonucleotide
agcggtgaaccaagacgcagta

SEQ ID NO: 1589 - DNA, 22 bp, Artificial Sequence
  Description of Artificial Sequence: Synthetic oligonucleotide
gagcggtgaaccaagacgcagt

SEQ ID NO: 1590 - DNA, 22 bp, Artificial Sequence
  Description of Artificial Sequence: Synthetic oligonucleotide
tgaaccaagacgcagtattatt

SEQ ID NO: 1591 - DNA, 22 bp, Artificial Sequence
  Description of Artificial Sequence: Synthetic oligonucleotide
gtgaaccaagacgcagtattat

SEQ ID NO: 1592 - DNA, 22 bp, Artificial Sequence
  Description of Artificial Sequence: Synthetic oligonucleotide
ggtgaaccaagacgcagtatta

SEQ ID NO: 1593 - DNA, 22 bp, Artificial Sequence
  Description of Artificial Sequence: Synthetic oligonucleotide
cggtgaaccaagacgcagtatt

SEQ ID NO: 1594 - DNA, 22 bp, Artificial Sequence
  Description of Artificial Sequence: Synthetic oligonucleotide
ccttgccatgttgagtgagagc

SEQ ID NO: 1595 - DNA, 22 bp, Artificial Sequence
  Description of Artificial Sequence: Synthetic oligonucleotide
tccttgccatgttgagtgagag

SEQ ID NO: 1596 - DNA, 22 bp, Artificial Sequence
  Description of Artificial Sequence: Synthetic oligonucleotide
atcacaacctggagcattgcaa

SEQ ID NO: 1597 - DNA, 22 bp, Artificial Sequence
  Description of Artificial Sequence: Synthetic oligonucleotide
catcacaacctggagcattgca

SEQ ID NO: 1598 - DNA, 22 bp, Artificial Sequence
  Description of Artificial Sequence: Synthetic oligonucleotide
acaacctggagcattgcaaaca

SEQ ID NO: 1599 - DNA, 22 bp, Artificial Sequence
  Description of Artificial Sequence: Synthetic oligonucleotide
tttgcgcatctgttatgaaata

SEQ ID NO: 1600 - DNA, 22 bp, Artificial Sequence
  Description of Artificial Sequence: Synthetic oligonucleotide
aacctggagcattgcaaacata

SEQ ID NO: 1601 - DNA, 22 bp, Artificial Sequence
  Description of Artificial Sequence: Synthetic oligonucleotide
aacacctgagcattgtctaaca

SEQ ID NO: 1602 - DNA, 22 bp, Artificial Sequence
  Description of Artificial Sequence: Synthetic oligonucleotide
acacctgagcattgtctaacaa

SEQ ID NO: 1603 - DNA, 22 bp, Artificial Sequence
  Description of Artificial Sequence: Synthetic oligonucleotide
gtaacacctgagcattgtctaa

SEQ ID NO: 1604 - DNA, 22 bp, Artificial Sequence
  Description of Artificial Sequence: Synthetic oligonucleotide
taacacctgagcattgtctaac

SEQ ID NO: 1605 - DNA, 22 bp, Artificial Sequence
  Description of Artificial Sequence: Synthetic oligonucleotide
cctgagcattgtctaacaacat

SEQ ID NO: 1606 - DNA, 22 bp, Artificial Sequence
  Description of Artificial Sequence: Synthetic oligonucleotide
ctgagcattgtctaacaacatc

SEQ ID NO: 1607 - DNA, 22 bp, Artificial Sequence
  Description of Artificial Sequence: Synthetic oligonucleotide
cacctgagcattgtctaacaac

SEQ ID NO: 1608 - DNA, 22 bp, Artificial Sequence
  Description of Artificial Sequence: Synthetic oligonucleotide
acctgagcattgtctaacaaca

SEQ ID NO: 1609 - DNA, 22 bp, Artificial Sequence
  Description of Artificial Sequence: Synthetic oligonucleotide
gcatcatagaacttccattcta

SEQ ID NO: 1610 - DNA, 22 bp, Artificial Sequence
  Description of Artificial Sequence: Synthetic oligonucleotide
catcatagaacttccattctac

SEQ ID NO: 1611 - DNA, 22 bp, Artificial Sequence
  Description of Artificial Sequence: Synthetic oligonucleotide
aatcaccgaaatcataccagtt

SEQ ID NO: 1612 - DNA, 22 bp, Artificial Sequence
  Description of Artificial Sequence: Synthetic oligonucleotide
tagaacttccattctacatcag

SEQ ID NO: 1613 - DNA, 22 bp, Artificial Sequence
  Description of Artificial Sequence: Synthetic oligonucleotide
agaacttccattctacatcagc

SEQ ID NO: 1614 - DNA, 22 bp, Artificial Sequence
  Description of Artificial Sequence: Synthetic oligonucleotide
tcacttactgtacaagcaaagc

SEQ ID NO: 1615 - DNA, 22 bp, Artificial Sequence
  Description of Artificial Sequence: Synthetic oligonucleotide
gtcacttactgtacaagcaaag

SEQ ID NO: 1616 - DNA, 22 bp, Artificial Sequence
  Description of Artificial Sequence: Synthetic oligonucleotide
ttactgtacaagcaaagcaata

SEQ ID NO: 1617 - DNA, 22 bp, Artificial Sequence
  Description of Artificial Sequence: Synthetic oligonucleotide
cttactgtacaagcaaagcaat

SEQ ID NO: 1618 - DNA, 22 bp, Artificial Sequence
  Description of Artificial Sequence: Synthetic oligonucleotide
acttactgtacaagcaaagcaa

SEQ ID NO: 1619 - DNA, 22 bp, Artificial Sequence
  Description of Artificial Sequence: Synthetic oligonucleotide
cacttactgtacaagcaaagca

SEQ ID NO: 1620 - DNA, 22 bp, Artificial Sequence
  Description of Artificial Sequence: Synthetic oligonucleotide
tgtacaagcaaagcaatattgt

SEQ ID NO: 1621 - DNA, 22 bp, Artificial Sequence
  Description of Artificial Sequence: Synthetic oligonucleotide
ctgtacaagcaaagcaatattg

SEQ ID NO: 1622 - DNA, 22 bp, Artificial Sequence
  Description of Artificial Sequence: Synthetic oligonucleotide
actgtacaagcaaagcaatatt

SEQ ID NO: 1623 - DNA, 22 bp, Artificial Sequence
  Description of Artificial Sequence: Synthetic oligonucleotide
tactgtacaagcaaagcaatat

SEQ ID NO: 1624 - DNA, 22 bp, Artificial Sequence
  Description of Artificial Sequence: Synthetic oligonucleotide
agttgttaacaagaacatcact

SEQ ID NO: 1625 - DNA, 22 bp, Artificial Sequence
  Description of Artificial Sequence: Synthetic oligonucleotide
tagttgttaacaagaacatcac

SEQ ID NO: 1626 - DNA, 22 bp, Artificial Sequence
  Description of Artificial Sequence: Synthetic oligonucleotide
ttaacaagaacatcactagaaa

SEQ ID NO: 1627 - DNA, 22 bp, Artificial Sequence
  Description of Artificial Sequence: Synthetic oligonucleotide
gttaacaagaacatcactagaa

SEQ ID NO: 1628 - DNA, 22 bp, Artificial Sequence
  Description of Artificial Sequence: Synthetic oligonucleotide
tgttaacaagaacatcactaga

SEQ ID NO: 1629 - DNA, 22 bp, Artificial Sequence
  Description of Artificial Sequence: Synthetic oligonucleotide
gaaagggagtgaggcttgtatc

SEQ ID NO: 1630 - DNA, 22 bp, Artificial Sequence
  Description of Artificial Sequence: Synthetic oligonucleotide
gggagtgaggcttgtatcggta

SEQ ID NO: 1631 - DNA, 22 bp, Artificial Sequence
  Description of Artificial Sequence: Synthetic oligonucleotide
ggagtgaggcttgtatcggtat

SEQ ID NO: 1632 - DNA, 22 bp, Artificial Sequence
  Description of Artificial Sequence: Synthetic oligonucleotide
aagggagtgaggcttgtatcgg

SEQ ID NO: 1633 - DNA, 22 bp, Artificial Sequence
  Description of Artificial Sequence: Synthetic oligonucleotide
gtgaggcttgtatcggtatcgt

SEQ ID NO: 1634 - DNA, 22 bp, Artificial Sequence
  Description of Artificial Sequence: Synthetic oligonucleotide
tgaggcttgtatcggtatcgtt

SEQ ID NO: 1635 - DNA, 22 bp, Artificial Sequence
  Description of Artificial Sequence: Synthetic oligonucleotide
gagtgaggcttgtatcggtatc

SEQ ID NO: 1636 - DNA, 22 bp, Artificial Sequence
  Description of Artificial Sequence: Synthetic oligonucleotide
agtgaggcttgtatcggtatcg

SEQ ID NO: 1637 - DNA, 22 bp, Artificial Sequence
  Description of Artificial Sequence: Synthetic oligonucleotide
tcatagccacaaggttaaagtc

SEQ ID NO: 1638 - DNA, 22 bp, Artificial Sequence
  Description of Artificial Sequence: Synthetic oligonucleotide
catagccacaaggttaaagtca

SEQ ID NO: 1639 - DNA, 22 bp, Artificial Sequence
  Description of Artificial Sequence: Synthetic oligonucleotide
cttcatagccacaaggttaaag

SEQ ID NO: 1640 - DNA, 22 bp, Artificial Sequence
  Description of Artificial Sequence: Synthetic oligonucleotide
ttcatagccacaaggttaaagt

SEQ ID NO: 1641 - DNA, 22 bp, Artificial Sequence
  Description of Artificial Sequence: Synthetic oligonucleotide
gccacaaggttaaagtcattaa

SEQ ID NO: 1642 - DNA, 22 bp, Artificial Sequence
  Description of Artificial Sequence: Synthetic oligonucleotide
atagccacaaggttaaagtcat

SEQ ID NO: 1643 - DNA, 22 bp, Artificial Sequence
  Description of Artificial Sequence: Synthetic oligonucleotide
tagccacaaggttaaagtcatt

SEQ ID NO: 1644 - DNA, 22 bp, Artificial Sequence
  Description of Artificial Sequence: Synthetic oligonucleotide
tacttcatagccacaaggttaa

SEQ ID NO: 1645 - DNA, 22 bp, Artificial Sequence
  Description of Artificial Sequence: Synthetic oligonucleotide
acttcatagccacaaggttaaa

SEQ ID NO: 1646 - DNA, 22 bp, Artificial Sequence
  Description of Artificial Sequence: Synthetic oligonucleotide
tttggccttgttgttgttggcc

SEQ ID NO: 1647 - DNA, 22 bp, Artificial Sequence
  Description of Artificial Sequence: Synthetic oligonucleotide
gtttggccttgttgttgttggc

SEQ ID NO: 1648 - DNA, 22 bp, Artificial Sequence
  Description of Artificial Sequence: Synthetic oligonucleotide
agtttggccttgttgttgttgg

SEQ ID NO: 1649 - DNA, 22 bp, Artificial Sequence
  Description of Artificial Sequence: Synthetic oligonucleotide
cagtttggccttgttgttgttg

SEQ ID NO: 1650 - DNA, 22 bp, Artificial Sequence
  Description of Artificial Sequence: Synthetic oligonucleotide
acagtttggccttgttgttgtt

SEQ ID NO: 1651 - DNA, 22 bp, Artificial Sequence
  Description of Artificial Sequence: Synthetic oligonucleotide
tgacagtttggccttgttgttg

SEQ ID NO: 1652 - DNA, 22 bp, Artificial Sequence
  Description of Artificial Sequence: Synthetic oligonucleotide
gtgacagtttggccttgttgtt

SEQ ID NO: 1653 - DNA, 22 bp, Artificial Sequence
  Description of Artificial Sequence: Synthetic oligonucleotide
agtgacagtttggccttgttgt

SEQ ID NO: 1654 - DNA, 22 bp, Artificial Sequence
  Description of Artificial Sequence: Synthetic oligonucleotide
tagtgacagtttggccttgttg

SEQ ID NO: 1655 - DNA, 22 bp, Artificial Sequence
  Description of Artificial Sequence: Synthetic oligonucleotide
tctgctgcaaaaagcttgagtc

SEQ ID NO: 1656 - DNA, 22 bp, Artificial Sequence
  Description of Artificial Sequence: Synthetic oligonucleotide
ctgctgcaaaaagcttgagtct

SEQ ID NO: 1657 - DNA, 22 bp, Artificial Sequence
  Description of Artificial Sequence: Synthetic oligonucleotide
ttctgctgcaaaaagcttgagt

SEQ ID NO: 1658 - DNA, 22 bp, Artificial Sequence
  Description of Artificial Sequence: Synthetic oligonucleotide
gtttagtaagtgggtaagcatc

SEQ ID NO: 1659 - DNA, 22 bp, Artificial Sequence
  Description of Artificial Sequence: Synthetic oligonucleotide
tgtttagtaagtgggtaagcat

SEQ ID NO: 1660 - DNA, 22 bp, Artificial Sequence
  Description of Artificial Sequence: Synthetic oligonucleotide
attctcataaacaaatccataa

SEQ ID NO: 1661 - DNA, 22 bp, Artificial Sequence
  Description of Artificial Sequence: Synthetic oligonucleotide
tcttccatataggcagctctcc

SEQ ID NO: 1662 - DNA, 22 bp, Artificial Sequence
  Description of Artificial Sequence: Synthetic oligonucleotide
ctcttccatataggcagctctc

SEQ ID NO: 1663 - DNA, 22 bp, Artificial Sequence
  Description of Artificial Sequence: Synthetic oligonucleotide
ttgcatggctgcatcacggtca

SEQ ID NO: 1664 - DNA, 22 bp, Artificial Sequence
  Description of Artificial Sequence: Synthetic oligonucleotide
gttgcatggctgcatcacggtc

SEQ ID NO: 1665 - DNA, 22 bp, Artificial Sequence
  Description of Artificial Sequence: Synthetic oligonucleotide
cgttgcatggctgcatcacggt

SEQ ID NO: 1666 - DNA, 22 bp, Artificial Sequence
  Description of Artificial Sequence: Synthetic oligonucleotide
gtagccaatttggtcatctgga

SEQ ID NO: 1667 - DNA, 22 bp, Artificial Sequence
  Description of Artificial Sequence: Synthetic oligonucleotide
agtagccaatttggtcatctgg

SEQ ID NO: 1668 - DNA, 22 bp, Artificial Sequence
  Description of Artificial Sequence: Synthetic oligonucleotide
agccaatttggtcatctggact

SEQ ID NO: 1669 - DNA, 22 bp, Artificial Sequence
  Description of Artificial Sequence: Synthetic oligonucleotide
tagccaatttggtcatctggac

SEQ ID NO: 1670 - DNA, 22 bp, Artificial Sequence
  Description of Artificial Sequence: Synthetic oligonucleotide
agtgcacaaaagttagcagctt

SEQ ID NO: 1671 - DNA, 22 bp, Artificial Sequence
  Description of Artificial Sequence: Synthetic oligonucleotide
taagtgcacaaaagttagcagc

SEQ ID NO: 1672 - DNA, 22 bp, Artificial Sequence
  Description of Artificial Sequence: Synthetic oligonucleotide
ataagtgcacaaaagttagcag

SEQ ID NO: 1673 - DNA, 22 bp, Artificial Sequence
  Description of Artificial Sequence: Synthetic oligonucleotide
cacaaaagttagcagcttcacc

SEQ ID NO: 1674 - DNA, 22 bp, Artificial Sequence
  Description of Artificial Sequence: Synthetic oligonucleotide
gcacaaaagttagcagcttcac

SEQ ID NO: 1675 - DNA, 22 bp, Artificial Sequence
  Description of Artificial Sequence: Synthetic oligonucleotide
tgcacaaaagttagcagcttca

SEQ ID NO: 1676 - DNA, 22 bp, Artificial Sequence
  Description of Artificial Sequence: Synthetic oligonucleotide
gtgcacaaaagttagcagcttc

SEQ ID NO: 1677 - DNA, 22 bp, Artificial Sequence
  Description of Artificial Sequence: Synthetic oligonucleotide
tttcaaaggtgtactctcctat

SEQ ID NO: 1678 - DNA, 22 bp, Artificial Sequence
  Description of Artificial Sequence: Synthetic oligonucleotide
cagcatcaccatagtcaccttt

SEQ ID NO: 1679 - DNA, 22 bp, Artificial Sequence
  Description of Artificial Sequence: Synthetic oligonucleotide
acagcatcaccatagtcacctt

SEQ ID NO: 1680 - DNA, 22 bp, Artificial Sequence
  Description of Artificial Sequence: Synthetic oligonucleotide
aacagcatcaccatagtcacct

SEQ ID NO: 1681 - DNA, 22 bp, Artificial Sequence
  Description of Artificial Sequence: Synthetic oligonucleotide
caacagcatcaccatagtcacc

SEQ ID NO: 1682 - DNA, 22 bp, Artificial Sequence
  Description of Artificial Sequence: Synthetic oligonucleotide
acaacagcatcaccatagtcac

SEQ ID NO: 1683 - DNA, 22 bp, Artificial Sequence
  Description of Artificial Sequence: Synthetic oligonucleotide
gaattcactttgaatttatcaa

SEQ ID NO: 1684 - DNA, 22 bp, Artificial Sequence
  Description of Artificial Sequence: Synthetic oligonucleotide
tgaattcactttgaatttatca

SEQ ID NO: 1685 - DNA, 22 bp, Artificial Sequence
  Description of Artificial Sequence: Synthetic oligonucleotide
ttgaattcactttgaatttatc

SEQ ID NO: 1686 - DNA, 22 bp, Artificial Sequence
  Description of Artificial Sequence: Synthetic oligonucleotide
gttgaattcactttgaatttat

SEQ ID NO: 1687 - DNA, 22 bp, Artificial Sequence
  Description of Artificial Sequence: Synthetic oligonucleotide
tcactttgaatttatcaaaaca

SEQ ID NO: 1688 - DNA, 22 bp, Artificial Sequence
  Description of Artificial Sequence: Synthetic oligonucleotide
ttcactttgaatttatcaaaac

SEQ ID NO: 1689 - DNA, 22 bp, Artificial Sequence
  Description of Artificial Sequence: Synthetic oligonucleotide
attcactttgaatttatcaaaa

SEQ ID NO: 1690 - DNA, 22 bp, Artificial Sequence
  Description of Artificial Sequence: Synthetic oligonucleotide
aattcactttgaatttatcaaa

SEQ ID NO: 1691 - DNA, 22 bp, Artificial Sequence
  Description of Artificial Sequence: Synthetic oligonucleotide
tgttgaattcactttgaattta

SEQ ID NO: 1692 - DNA, 22 bp, Artificial Sequence
  Description of Artificial Sequence: Synthetic oligonucleotide
atgttgaattcactttgaattt

SEQ ID NO: 1693 - DNA, 22 bp, Artificial Sequence
  Description of Artificial Sequence: Synthetic oligonucleotide
tatttgtgaaaaattaaaacca

SEQ ID NO: 1694 - DNA, 22 bp, Artificial Sequence
  Description of Artificial Sequence: Synthetic oligonucleotide
atttgtgaaaaattaaaaccac

SEQ ID NO: 1695 - DNA, 22 bp, Artificial Sequence
  Description of Artificial Sequence: Synthetic oligonucleotide
aatatttgtgaaaaattaaaac

SEQ ID NO: 1696 - DNA, 22 bp, Artificial Sequence
  Description of Artificial Sequence: Synthetic oligonucleotide
tggtaatatttgtgaaaaatta

SEQ ID NO: 1697 - DNA, 22 bp, Artificial Sequence
  Description of Artificial Sequence: Synthetic oligonucleotide
tctggtaatatttgtgaaaaat

SEQ ID NO: 1698 - DNA, 22 bp, Artificial Sequence
  Description of Artificial Sequence: Synthetic oligonucleotide
ctggtaatatttgtgaaaaatt

SEQ ID NO: 1699 - DNA, 22 bp, Artificial Sequence
  Description of Artificial Sequence: Synthetic oligonucleotide
tttgttaaaattaccgggtttg

SEQ ID NO: 1700 - DNA, 22 bp, Artificial Sequence
  Description of Artificial Sequence: Synthetic oligonucleotide
ctttgttaaaattaccgggttt

SEQ ID NO: 1701 - DNA, 22 bp, Artificial Sequence
  Description of Artificial Sequence: Synthetic oligonucleotide
ttaaaattaccgggtttgacag

SEQ ID NO: 1702 - DNA, 22 bp, Artificial Sequence
  Description of Artificial Sequence: Synthetic oligonucleotide
gttaaaattaccgggtttgaca

SEQ ID NO: 1703 - DNA, 22 bp, Artificial Sequence
  Description of Artificial Sequence: Synthetic oligonucleotide
tgttaaaattaccgggtttgac

SEQ ID NO: 1704 - DNA, 22 bp, Artificial Sequence
  Description of Artificial Sequence: Synthetic oligonucleotide
ttgttaaaattaccgggtttga

SEQ ID NO: 1705 - DNA, 22 bp, Artificial Sequence
  Description of Artificial Sequence: Synthetic oligonucleotide
aattaccgggtttgacagtttg

SEQ ID NO: 1706 - DNA, 22 bp, Artificial Sequence
  Description of Artificial Sequence: Synthetic oligonucleotide
aaattaccgggtttgacagttt

SEQ ID NO: 1707 - DNA, 22 bp, Artificial Sequence
  Description of Artificial Sequence: Synthetic oligonucleotide
aaaattaccgggtttgacagtt

SEQ ID NO: 1708 - DNA, 22 bp, Artificial Sequence
  Description of Artificial Sequence: Synthetic oligonucleotide
taaaattaccgggtttgacagt

SEQ ID NO: 1709 - DNA, 22 bp, Artificial Sequence
  Description of Artificial Sequence: Synthetic oligonucleotide
caagaatgttctgttatcttta

SEQ ID NO: 1710 - DNA, 22 bp, Artificial Sequence
  Description of Artificial Sequence: Synthetic oligonucleotide
gcacacatatctaaaacggcaa

SEQ ID NO: 1711 - DNA, 22 bp, Artificial Sequence
  Description of Artificial Sequence: Synthetic oligonucleotide
cagatggtgaaccattgtaaca

SEQ ID NO: 1712 - DNA, 22 bp, Artificial Sequence
  Description of Artificial Sequence: Synthetic oligonucleotide
gtgccaagctcgtcgcctaagt

SEQ ID NO: 1713 - DNA, 22 bp, Artificial Sequence
  Description of Artificial Sequence: Synthetic oligonucleotide
agtgccaagctcgtcgcctaag

SEQ ID NO: 1714 - DNA, 22 bp, Artificial Sequence
  Description of Artificial Sequence: Synthetic oligonucleotide
tgccaagctcgtcgcctaagtc

SEQ ID NO: 1715 - DNA, 22 bp, Artificial Sequence
  Description of Artificial Sequence: Synthetic oligonucleotide
cgcaaacccgtttaaaaacgat

SEQ ID NO: 1716 - DNA, 22 bp, Artificial Sequence
  Description of Artificial Sequence: Synthetic oligonucleotide
tatgtctacagcaccctgcatg

SEQ ID NO: 1717 - DNA, 22 bp, Artificial Sequence
  Description of Artificial Sequence: Synthetic oligonucleotide
atgtctacagcaccctgcatgg

SEQ ID NO: 1718 - DNA, 22 bp, Artificial Sequence
  Description of Artificial Sequence: Synthetic oligonucleotide
tctacagcaccctgcatggaaa

SEQ ID NO: 1719 - DNA, 22 bp, Artificial Sequence
  Description of Artificial Sequence: Synthetic oligonucleotide
ctacagcaccctgcatggaaag

SEQ ID NO: 1720 - DNA, 22 bp, Artificial Sequence
  Description of Artificial Sequence: Synthetic oligonucleotide
tgtctacagcaccctgcatgga

SEQ ID NO: 1721 - DNA, 22 bp, Artificial Sequence
  Description of Artificial Sequence: Synthetic oligonucleotide
gtctacagcaccctgcatggaa

SEQ ID NO: 1722 - DNA, 22 bp, Artificial Sequence
  Description of Artificial Sequence: Synthetic oligonucleotide
cagcaccctgcatggaaagcaa

SEQ ID NO: 1723 - DNA, 22 bp, Artificial Sequence
  Description of Artificial Sequence: Synthetic oligonucleotide
agcaccctgcatggaaagcaaa

SEQ ID NO: 1724 - DNA, 22 bp, Artificial Sequence
  Description of Artificial Sequence: Synthetic oligonucleotide
tacagcaccctgcatggaaagc

SEQ ID NO: 1725 - DNA, 22 bp, Artificial Sequence
  Description of Artificial Sequence: Synthetic oligonucleotide
acagcaccctgcatggaaagca

SEQ ID NO: 1726 - DNA, 22 bp, Artificial Sequence
  Description of Artificial Sequence: Synthetic oligonucleotide
cgccacacatgaccatttcact

SEQ ID NO: 1727 - DNA, 22 bp, Artificial Sequence
  Description of Artificial Sequence: Synthetic oligonucleotide
ttgaatctgagggtccaccaaa

SEQ ID NO: 1728 - DNA, 22 bp, Artificial Sequence
  Description of Artificial Sequence: Synthetic oligonucleotide
aaatcatctggtaatttataat

SEQ ID NO: 1729 - DNA, 22 bp, Artificial Sequence
  Description of Artificial Sequence: Synthetic oligonucleotide
gcaggtccttgatgtcacagcg

SEQ ID NO: 1730 - DNA, 22 bp, Artificial Sequence
  Description of Artificial Sequence: Synthetic oligonucleotide
ggcaggtccttgatgtcacagc

SEQ ID NO: 1731 - DNA, 22 bp, Artificial Sequence
  Description of Artificial Sequence: Synthetic oligonucleotide
taagcatagtgaaaagcattgt

SEQ ID NO: 1732 - DNA, 22 bp, Artificial Sequence
  Description of Artificial Sequence: Synthetic oligonucleotide
ctaagcatagtgaaaagcattg

SEQ ID NO: 1733 - DNA, 22 bp, Artificial Sequence
  Description of Artificial Sequence: Synthetic oligonucleotide
gaaaaagaagtacgctattaac

SEQ ID NO: 1734 - DNA, 22 bp, Artificial Sequence
  Description of Artificial Sequence: Synthetic oligonucleotide
aaaaagaagtacgctattaact

SEQ ID NO: 1735 - DNA, 22 bp, Artificial Sequence
  Description of Artificial Sequence: Synthetic oligonucleotide
aagaaaaagaagtacgctatta

SEQ ID NO: 1736 - DNA, 22 bp, Artificial Sequence
  Description of Artificial Sequence: Synthetic oligonucleotide
agaaaaagaagtacgctattaa

SEQ ID NO: 1737 - DNA, 22 bp, Artificial Sequence
  Description of Artificial Sequence: Synthetic oligonucleotide
gcaagaaaaagaagtacgctat

SEQ ID NO: 1738 - DNA, 22 bp, Artificial Sequence
  Description of Artificial Sequence: Synthetic oligonucleotide
caagaaaaagaagtacgctatt

SEQ ID NO: 1739 - DNA, 22 bp, Artificial Sequence
  Description of Artificial Sequence: Synthetic oligonucleotide
aagcaagaaaaagaagtacgct

SEQ ID NO: 1740 - DNA, 22 bp, Artificial Sequence
  Description of Artificial Sequence: Synthetic oligonucleotide
agcaagaaaaagaagtacgcta

SEQ ID NO: 1741 - DNA, 22 bp, Artificial Sequence
  Description of Artificial Sequence: Synthetic oligonucleotide
gaaagcaagaaaaagaagtacg

SEQ ID NO: 1742 - DNA, 22 bp, Artificial Sequence
  Description of Artificial Sequence: Synthetic oligonucleotide
aaagcaagaaaaagaagtacgc

SEQ ID NO: 1743 - DNA, 22 bp, Artificial Sequence
  Description of Artificial Sequence: Synthetic oligonucleotide
agctgtacctggtgcaactcct

SEQ ID NO: 1744 - DNA, 22 bp, Artificial Sequence
  Description of Artificial Sequence: Synthetic oligonucleotide
gaggcttgactgccgcctctgc

SEQ ID NO: 1745 - DNA, 22 bp, Artificial Sequence
  Description of Artificial Sequence: Synthetic oligonucleotide
agaggcttgactgccgcctctg

SEQ ID NO: 1746 - DNA, 22 bp, Artificial Sequence
  Description of Artificial Sequence: Synthetic oligonucleotide
ggcttgactgccgcctctgctc

SEQ ID NO: 1747 - DNA, 22 bp, Artificial Sequence
  Description of Artificial Sequence: Synthetic oligonucleotide
aggcttgactgccgcctctgct

SEQ ID NO: 1748 - DNA, 22 bp, Artificial Sequence
  Description of Artificial Sequence: Synthetic oligonucleotide
cttgactgccgcctctgctccc

SEQ ID NO: 1749 - DNA, 22 bp, Artificial Sequence
  Description of Artificial Sequence: Synthetic oligonucleotide
aagaggcttgactgccgcctct

SEQ ID NO: 1750 - DNA, 22 bp, Artificial Sequence
  Description of Artificial Sequence: Synthetic oligonucleotide
gaagaggcttgactgccgcctc

SEQ ID NO: 1751 - DNA, 22 bp, Artificial Sequence
  Description of Artificial Sequence: Synthetic oligonucleotide
caagattagcagaagctctgat

SEQ ID NO: 1752 - DNA, 22 bp, Artificial Sequence
  Description of Artificial Sequence: Synthetic oligonucleotide
aagattagcagaagctctgatt

SEQ ID NO: 1753 - DNA, 22 bp, Artificial Sequence
  Description of Artificial Sequence: Synthetic oligonucleotide
tccccaaaatttccttgggttt

SEQ ID NO: 1754 - DNA, 22 bp, Artificial Sequence
  Description of Artificial Sequence: Synthetic oligonucleotide
agattagcagaagctctgattt

SEQ ID NO: 1755 - DNA, 22 bp, Artificial Sequence
  Description of Artificial Sequence: Synthetic oligonucleotide
gattagcagaagctctgatttc

SEQ ID NO: 1756 - DNA, 22 bp, Artificial Sequence
  Description of Artificial Sequence: Synthetic oligonucleotide
atttccttgggtttgttctgga

SEQ ID NO: 1757 - DNA, 22 bp, Artificial Sequence
  Description of Artificial Sequence: Synthetic oligonucleotide
aatttccttgggtttgttctgg

SEQ ID NO: 1758 - DNA, 22 bp, Artificial Sequence
  Description of Artificial Sequence: Synthetic oligonucleotide
aaatttccttgggtttgttctg

SEQ ID NO: 1759 - DNA, 22 bp, Artificial Sequence
  Description of Artificial Sequence: Synthetic oligonucleotide
aaaatttccttgggtttgttct

SEQ ID NO: 1760 - DNA, 22 bp, Artificial Sequence
  Description of Artificial Sequence: Synthetic oligonucleotide
caaaatttccttgggtttgttc

SEQ ID NO: 1761 - DNA, 22 bp, Artificial Sequence
  Description of Artificial Sequence: Synthetic oligonucleotide
ccaaaatttccttgggtttgtt

SEQ ID NO: 1762 - DNA, 22 bp, Artificial Sequence
  Description of Artificial Sequence: Synthetic oligonucleotide
cccaaaatttccttgggtttgt

SEQ ID NO: 1763 - DNA, 22 bp, Artificial Sequence
  Description of Artificial Sequence: Synthetic oligonucleotide
ccccaaaatttccttgggtttg

SEQ ID NO: 1764 - DNA, 22 bp, Artificial Sequence
  Description of Artificial Sequence: Synthetic oligonucleotide
tcataagtctacacactgaatt

SEQ ID NO: 1765 - DNA, 22 bp, Artificial Sequence
  Description of Artificial Sequence: Synthetic oligonucleotide
acttagtttcttccagagttgt

SEQ ID NO: 1766 - DNA, 22 bp, Artificial Sequence
  Description of Artificial Sequence: Synthetic oligonucleotide
aacttagtttcttccagagttg

SEQ ID NO: 1767 - DNA, 22 bp, Artificial Sequence
  Description of Artificial Sequence: Synthetic oligonucleotide
agccctgtgatgaatcaacagt

SEQ ID NO: 1768 - DNA, 22 bp, Artificial Sequence
  Description of Artificial Sequence: Synthetic oligonucleotide
gcacaagacatctgtcgtagtg

SEQ ID NO: 1769 - DNA, 22 bp, Artificial Sequence
  Description of Artificial Sequence: Synthetic oligonucleotide
atgaaagacatcagcatactcc

SEQ ID NO: 1770 - DNA, 22 bp, Artificial Sequence
  Description of Artificial Sequence: Synthetic oligonucleotide
aatgaaagacatcagcatactc

SEQ ID NO: 1771 - DNA, 22 bp, Artificial Sequence
  Description of Artificial Sequence: Synthetic oligonucleotide
aaatgaaagacatcagcatact

SEQ ID NO: 1772 - DNA, 22 bp, Artificial Sequence
  Description of Artificial Sequence: Synthetic oligonucleotide
caaatgaaagacatcagcatac

SEQ ID NO: 1773 - DNA, 22 bp, Artificial Sequence
  Description of Artificial Sequence: Synthetic oligonucleotide
tacaaatgaaagacatcagcat

SEQ ID NO: 1774 - DNA, 22 bp, Artificial Sequence
  Description of Artificial Sequence: Synthetic oligonucleotide
acctattactaggttccattgt

SEQ ID NO: 1775 - DNA, 22 bp, Artificial Sequence
  Description of Artificial Sequence: Synthetic oligonucleotide
ctattactaggttccattgttc

SEQ ID NO: 1776 - DNA, 22 bp, Artificial Sequence
  Description of Artificial Sequence: Synthetic oligonucleotide
cctattactaggttccattgtt

SEQ ID NO: 1777 - DNA, 22 bp, Artificial Sequence
  Description of Artificial Sequence: Synthetic oligonucleotide
ggaaacctattactaggttcca

SEQ ID NO: 1778 - DNA, 22 bp, Artificial Sequence
  Description of Artificial Sequence: Synthetic oligonucleotide
aggaaacctattactaggttcc

SEQ ID NO: 1779 - DNA, 22 bp, Artificial Sequence
  Description of Artificial Sequence: Synthetic oligonucleotide
aaacctattactaggttccatt

SEQ ID NO: 1780 - DNA, 22 bp, Artificial Sequence
  Description of Artificial Sequence: Synthetic oligonucleotide
taggaaacctattactaggttc

SEQ ID NO: 1781 - DNA, 22 bp, Artificial Sequence
  Description of Artificial Sequence: Synthetic oligonucleotide
ataggaaacctattactaggtt

SEQ ID NO: 1782 - DNA, 22 bp, Artificial Sequence
  Description of Artificial Sequence: Synthetic oligonucleotide
atatagtgaaccgccacacatg

SEQ ID NO: 1783 - DNA, 22 bp, Artificial Sequence
  Description of Artificial Sequence: Synthetic oligonucleotide
gtttgtaatcagttccttgtct

SEQ ID NO: 1784 - DNA, 22 bp, Artificial Sequence
  Description of Artificial Sequence: Synthetic oligonucleotide
tttgtaatcagttccttgtctg

SEQ ID NO: 1785 - DNA, 22 bp, Artificial Sequence
  Description of Artificial Sequence: Synthetic oligonucleotide
ttgtaatcagttccttgtctga

SEQ ID NO: 1786 - DNA, 22 bp, Artificial Sequence
  Description of Artificial Sequence: Synthetic oligonucleotide
tgtaatcagttccttgtctgat

SEQ ID NO: 1787 - DNA, 22 bp, Artificial Sequence
  Description of Artificial Sequence: Synthetic oligonucleotide
caatgtttgtaatcagttcctt

SEQ ID NO: 1788 - DNA, 22 bp, Artificial Sequence
  Description of Artificial Sequence: Synthetic oligonucleotide
aatgtttgtaatcagttccttg

SEQ ID NO: 1789 - DNA, 22 bp, Artificial Sequence
  Description of Artificial Sequence: Synthetic oligonucleotide
atgtttgtaatcagttccttgt

SEQ ID NO: 1790 - DNA, 22 bp, Artificial Sequence
  Description of Artificial Sequence: Synthetic oligonucleotide
tgtttgtaatcagttccttgtc

SEQ ID NO: 1791 - DNA, 22 bp, Artificial Sequence
  Description of Artificial Sequence: Synthetic oligonucleotide
ccaatgtttgtaatcagttcct

SEQ ID NO: 1792 - DNA, 22 bp, Artificial Sequence
  Description of Artificial Sequence: Synthetic oligonucleotide
tgttaaaaccaacactaccaca

SEQ ID NO: 1793 - DNA, 22 bp, Artificial Sequence
  Description of Artificial Sequence: Synthetic oligonucleotide
gttaaaaccaacactaccacat

SEQ ID NO: 1794 - DNA, 22 bp, Artificial Sequence
  Description of Artificial Sequence: Synthetic oligonucleotide
ttaaaaccaacactaccacatg

SEQ ID NO: 1795 - DNA, 22 bp, Artificial Sequence
  Description of Artificial Sequence: Synthetic oligonucleotide
taaaaccaacactaccacatga

SEQ ID NO: 1796 - DNA, 22 bp, Artificial Sequence
  Description of Artificial Sequence: Synthetic oligonucleotide
tctatgttaaaaccaacactac

SEQ ID NO: 1797 - DNA, 22 bp, Artificial Sequence
  Description of Artificial Sequence: Synthetic oligonucleotide
ctatgttaaaaccaacactacc

SEQ ID NO: 1798 - DNA, 22 bp, Artificial Sequence
  Description of Artificial Sequence: Synthetic oligonucleotide
tatgttaaaaccaacactacca

SEQ ID NO: 1799 - DNA, 22 bp, Artificial Sequence
  Description of Artificial Sequence: Synthetic oligonucleotide
atgttaaaaccaacactaccac

SEQ ID NO: 1800 - DNA, 22 bp, Artificial Sequence
  Description of Artificial Sequence: Synthetic oligonucleotide
aatctatgttaaaaccaacact

SEQ ID NO: 1801 - DNA, 22 bp, Artificial Sequence
  Description of Artificial Sequence: Synthetic oligonucleotide
atctatgttaaaaccaacacta

SEQ ID NO: 1802 - DNA, 22 bp, Artificial Sequence
  Description of Artificial Sequence: Synthetic oligonucleotide
acctttcggtcacacccggacg

SEQ ID NO: 1803 - DNA, 22 bp, Artificial Sequence
  Description of Artificial Sequence: Synthetic oligonucleotide
tacctttcggtcacacccggac

SEQ ID NO: 1804 - DNA, 22 bp, Artificial Sequence
  Description of Artificial Sequence: Synthetic oligonucleotide
cggtcacacccggacgaaacct

SEQ ID NO: 1805 - DNA, 22 bp, Artificial Sequence
  Description of Artificial Sequence: Synthetic oligonucleotide
tcggtcacacccggacgaaacc

SEQ ID NO: 1806 - DNA, 22 bp, Artificial Sequence
  Description of Artificial Sequence: Synthetic oligonucleotide
gtcacacccggacgaaacctag

SEQ ID NO: 1807 - DNA, 22 bp, Artificial Sequence
  Description of Artificial Sequence: Synthetic oligonucleotide
ggtcacacccggacgaaaccta

SEQ ID NO: 1808 - DNA, 22 bp, Artificial Sequence
  Description of Artificial Sequence: Synthetic oligonucleotide
ctttcggtcacacccggacgaa

SEQ ID NO: 1809 - DNA, 22 bp, Artificial Sequence
  Description of Artificial Sequence: Synthetic oligonucleotide
cctttcggtcacacccggacga

SEQ ID NO: 1810 - DNA, 22 bp, Artificial Sequence
  Description of Artificial Sequence: Synthetic oligonucleotide
ttcggtcacacccggacgaaac

SEQ ID NO: 1811 - DNA, 22 bp, Artificial Sequence
  Description of Artificial Sequence: Synthetic oligonucleotide
tttcggtcacacccggacgaaa

SEQ ID NO: 1812 - DNA, 22 bp, Artificial Sequence
  Description of Artificial Sequence: Synthetic oligonucleotide
catgaaagatgtaattctctgt

SEQ ID NO: 1813 - DNA, 22 bp, Artificial Sequence
  Description of Artificial Sequence: Synthetic oligonucleotide
ccatgaaagatgtaattctctg

SEQ ID NO: 1814 - DNA, 22 bp, Artificial Sequence
  Description of Artificial Sequence: Synthetic oligonucleotide
cccatgaaagatgtaattctct

SEQ ID NO: 1815 - DNA, 22 bp, Artificial Sequence
  Description of Artificial Sequence: Synthetic oligonucleotide
tcccatgaaagatgtaattctc

SEQ ID NO: 1816 - DNA, 22 bp, Artificial Sequence
  Description of Artificial Sequence: Synthetic oligonucleotide
taggtcatgtccttaggtatgc

SEQ ID NO: 1817 - DNA, 22 bp, Artificial Sequence
  Description of Artificial Sequence: Synthetic oligonucleotide
aggtcatgtccttaggtatgcc

SEQ ID NO: 1818 - DNA, 22 bp, Artificial Sequence
  Description of Artificial Sequence: Synthetic oligonucleotide
tacatttatctataggcaaata

SEQ ID NO: 1819 - DNA, 22 bp, Artificial Sequence
  Description of Artificial Sequence: Synthetic oligonucleotide
tctccaattaatgtgactccat

SEQ ID NO: 1820 - DNA, 22 bp, Artificial Sequence
  Description of Artificial Sequence: Synthetic oligonucleotide
ctccaattaatgtgactccatt

SEQ ID NO: 1821 - DNA, 22 bp, Artificial Sequence
  Description of Artificial Sequence: Synthetic oligonucleotide
cttctccaattaatgtgactcc

SEQ ID NO: 1822 - DNA, 22 bp, Artificial Sequence
  Description of Artificial Sequence: Synthetic oligonucleotide
ttctccaattaatgtgactcca

SEQ ID NO: 1823 - DNA, 22 bp, Artificial Sequence
  Description of Artificial Sequence: Synthetic oligonucleotide
tccaattaatgtgactccatta

SEQ ID NO: 1824 - DNA, 22 bp, Artificial Sequence
  Description of Artificial Sequence: Synthetic oligonucleotide
ccaattaatgtgactccattaa

SEQ ID NO: 1825 - DNA, 22 bp, Artificial Sequence
  Description of Artificial Sequence: Synthetic oligonucleotide
gcttctccaattaatgtgactc

SEQ ID NO: 1826 - DNA, 22 bp, Artificial Sequence
  Description of Artificial Sequence: Synthetic oligonucleotide
caaagtacttatcaacaacttc

SEQ ID NO: 1827 - DNA, 22 bp, Artificial Sequence
  Description of Artificial Sequence: Synthetic oligonucleotide
agtacttatcaacaacttcaac

SEQ ID NO: 1828 - DNA, 22 bp, Artificial Sequence
  Description of Artificial Sequence: Synthetic oligonucleotide
tacttatcaacaacttcaacta

SEQ ID NO: 1829 - DNA, 22 bp, Artificial Sequence
  Description of Artificial Sequence: Synthetic oligonucleotide
gtacttatcaacaacttcaact

SEQ ID NO: 1830 - DNA, 22 bp, Artificial Sequence
  Description of Artificial Sequence: Synthetic oligonucleotide
acttatcaacaacttcaactac

SEQ ID NO: 1831 - DNA, 22 bp, Artificial Sequence
  Description of Artificial Sequence: Synthetic oligonucleotide
tatcaacaacttcaactacaaa

SEQ ID NO: 1832 - DNA, 22 bp, Artificial Sequence
  Description of Artificial Sequence: Synthetic oligonucleotide
ttatcaacaacttcaactacaa

SEQ ID NO: 1833 - DNA, 22 bp, Artificial Sequence
  Description of Artificial Sequence: Synthetic oligonucleotide
gcagcattaccatcctgagcaa

SEQ ID NO: 1834 - DNA, 22 bp, Artificial Sequence
  Description of Artificial Sequence: Synthetic oligonucleotide
agcagcattaccatcctgagca

SEQ ID NO: 1835 - DNA, 22 bp, Artificial Sequence
  Description of Artificial Sequence: Synthetic oligonucleotide
tagcagcattaccatcctgagc

SEQ ID NO: 1836 - DNA, 22 bp, Artificial Sequence
  Description of Artificial Sequence: Synthetic oligonucleotide
atagcagcattaccatcctgag

SEQ ID NO: 1837 - DNA, 22 bp, Artificial Sequence
  Description of Artificial Sequence: Synthetic oligonucleotide
agcattaccatcctgagcaaag

SEQ ID NO: 1838 - DNA, 22 bp, Artificial Sequence
  Description of Artificial Sequence: Synthetic oligonucleotide
cagcattaccatcctgagcaaa

SEQ ID NO: 1839 - DNA, 22 bp, Artificial Sequence
  Description of Artificial Sequence: Synthetic oligonucleotide
gcattgcaaacatacggattaa

SEQ ID NO: 1840 - DNA, 22 bp, Artificial Sequence
  Description of Artificial Sequence: Synthetic oligonucleotide
cattgcaaacatacggattaac

SEQ ID NO: 1841 - DNA, 22 bp, Artificial Sequence
  Description of Artificial Sequence: Synthetic oligonucleotide
attgcaaacatacggattaaca

SEQ ID NO: 1842 - DNA, 22 bp, Artificial Sequence
  Description of Artificial Sequence: Synthetic oligonucleotide
ttgcaaacatacggattaacag

SEQ ID NO: 1843 - DNA, 22 bp, Artificial Sequence
  Description of Artificial Sequence: Synthetic oligonucleotide
tgcaaacatacggattaacaga

SEQ ID NO: 1844 - DNA, 22 bp, Artificial Sequence
  Description of Artificial Sequence: Synthetic oligonucleotide
gcaaacatacggattaacagac

SEQ ID NO: 1845 - DNA, 22 bp, Artificial Sequence
  Description of Artificial Sequence: Synthetic oligonucleotide
caacctggagcattgcaaacat

SEQ ID NO: 1846 - DNA, 22 bp, Artificial Sequence
  Description of Artificial Sequence: Synthetic oligonucleotide
catgtcataatacgcatcaccc

SEQ ID NO: 1847 - DNA, 22 bp, Artificial Sequence
  Description of Artificial Sequence: Synthetic oligonucleotide
ccatgtcataatacgcatcacc

SEQ ID NO: 1848 - DNA, 22 bp, Artificial Sequence
  Description of Artificial Sequence: Synthetic oligonucleotide
tcacaacctggagcattgcaaa

SEQ ID NO: 1849 - DNA, 22 bp, Artificial Sequence
  Description of Artificial Sequence: Synthetic oligonucleotide
acctataagccatttgcatagc

SEQ ID NO: 1850 - DNA, 22 bp, Artificial Sequence
  Description of Artificial Sequence: Synthetic oligonucleotide
aacctataagccatttgcatag

SEQ ID NO: 1851 - DNA, 22 bp, Artificial Sequence
  Description of Artificial Sequence: Synthetic oligonucleotide
ctataagccatttgcatagcaa

SEQ ID NO: 1852 - DNA, 22 bp, Artificial Sequence
  Description of Artificial Sequence: Synthetic oligonucleotide
cctataagccatttgcatagca

SEQ ID NO: 1853 - DNA, 22 bp, Artificial Sequence
  Description of Artificial Sequence: Synthetic oligonucleotide
gaacgtttgatgaacacatagg

SEQ ID NO: 1854 - DNA, 22 bp, Artificial Sequence
  Description of Artificial Sequence: Synthetic oligonucleotide
aacgtttgatgaacacataggg

SEQ ID NO: 1855 - DNA, 22 bp, Artificial Sequence
  Description of Artificial Sequence: Synthetic oligonucleotide
acgtttgatgaacacatagggc

SEQ ID NO: 1856 - DNA, 22 bp, Artificial Sequence
  Description of Artificial Sequence: Synthetic oligonucleotide
cgtttgatgaacacatagggct

SEQ ID NO: 1857 - DNA, 22 bp, Artificial Sequence
  Description of Artificial Sequence: Synthetic oligonucleotide
gcatcaacagcggcatgagagc

SEQ ID NO: 1858 - DNA, 22 bp, Artificial Sequence
  Description of Artificial Sequence: Synthetic oligonucleotide
catcaacagcggcatgagagca

SEQ ID NO: 1859 - DNA, 22 bp, Artificial Sequence
  Description of Artificial Sequence: Synthetic oligonucleotide
gcttcttcgcgggtgataaaca

SEQ ID NO: 1860 - DNA, 22 bp, Artificial Sequence
  Description of Artificial Sequence: Synthetic oligonucleotide
agcttcttcgcgggtgataaac

SEQ ID NO: 1861 - DNA, 22 bp, Artificial Sequence
  Description of Artificial Sequence: Synthetic oligonucleotide
gcgggtgataaacatgttaggg

SEQ ID NO: 1862 - DNA, 22 bp, Artificial Sequence
  Description of Artificial Sequence: Synthetic oligonucleotide
cgcgggtgataaacatgttagg

SEQ ID NO: 1863 - DNA, 22 bp, Artificial Sequence
  Description of Artificial Sequence: Synthetic oligonucleotide
tcgcgggtgataaacatgttag

SEQ ID NO: 1864 - DNA, 22 bp, Artificial Sequence
  Description of Artificial Sequence: Synthetic oligonucleotide
ttcgcgggtgataaacatgtta

SEQ ID NO: 1865 - DNA, 22 bp, Artificial Sequence
  Description of Artificial Sequence: Synthetic oligonucleotide
cttcgcgggtgataaacatgtt

SEQ ID NO: 1866 - DNA, 22 bp, Artificial Sequence
  Description of Artificial Sequence: Synthetic oligonucleotide
tcttcgcgggtgataaacatgt

SEQ ID NO: 1867 - DNA, 22 bp, Artificial Sequence
  Description of Artificial Sequence: Synthetic oligonucleotide
ttcttcgcgggtgataaacatg

SEQ ID NO: 1868 - DNA, 22 bp, Artificial Sequence
  Description of Artificial Sequence: Synthetic oligonucleotide
cttcttcgcgggtgataaacat

SEQ ID NO: 1869 - DNA, 22 bp, Artificial Sequence
  Description of Artificial Sequence: Synthetic oligonucleotide
gcaacacccggttgccacgctt

SEQ ID NO: 1870 - DNA, 22 bp, Artificial Sequence
  Description of Artificial Sequence: Synthetic oligonucleotide
caacacccggttgccacgcttg

SEQ ID NO: 1871 - DNA, 22 bp, Artificial Sequence
  Description of Artificial Sequence: Synthetic oligonucleotide
gcaagagaaggtaacaaaaaca

SEQ ID NO: 1872 - DNA, 22 bp, Artificial Sequence
  Description of Artificial Sequence: Synthetic oligonucleotide
caagagaaggtaacaaaaacaa

SEQ ID NO: 1873 - DNA, 22 bp, Artificial Sequence
  Description of Artificial Sequence: Synthetic oligonucleotide
cattctgtgaattataaggtga

SEQ ID NO: 1874 - DNA, 22 bp, Artificial Sequence
  Description of Artificial Sequence: Synthetic oligonucleotide
gcaatttcatgctcatgttcac

SEQ ID NO: 1875 - DNA, 22 bp, Artificial Sequence
  Description of Artificial Sequence: Synthetic oligonucleotide
caatttcatgctcatgttcacg

SEQ ID NO: 1876 - DNA, 22 bp, Artificial Sequence
  Description of Artificial Sequence: Synthetic oligonucleotide
aatttcatgctcatgttcacgg

SEQ ID NO: 1877 - DNA, 22 bp, Artificial Sequence
  Description of Artificial Sequence: Synthetic oligonucleotide
atttcatgctcatgttcacggc

SEQ ID NO: 1878 - DNA, 22 bp, Artificial Sequence
  Description of Artificial Sequence: Synthetic oligonucleotide
accaagcaatttcatgctcatg

SEQ ID NO: 1879 - DNA, 22 bp, Artificial Sequence
  Description of Artificial Sequence: Synthetic oligonucleotide
ttgcagcagtacgcacacaatc

SEQ ID NO: 1880 - DNA, 22 bp, Artificial Sequence
  Description of Artificial Sequence: Synthetic oligonucleotide
acaatattgcagcagtacgcac

SEQ ID NO: 1881 - DNA, 22 bp, Artificial Sequence
  Description of Artificial Sequence: Synthetic oligonucleotide
gaaaaacagcaagaagtgcaac

SEQ ID NO: 1882 - DNA, 22 bp, Artificial Sequence
  Description of Artificial Sequence: Synthetic oligonucleotide
ccacacccaaattattgagtat

SEQ ID NO: 1883 - DNA, 22 bp, Artificial Sequence
  Description of Artificial Sequence: Synthetic oligonucleotide
acacccaaattattgagtattt

SEQ ID NO: 1884 - DNA, 22 bp, Artificial Sequence
  Description of Artificial Sequence: Synthetic oligonucleotide
tccacacccaaattattgagta

SEQ ID NO: 1885 - DNA, 22 bp, Artificial Sequence
  Description of Artificial Sequence: Synthetic oligonucleotide
agtagctcctctagtggcggct

SEQ ID NO: 1886 - DNA, 22 bp, Artificial Sequence
  Description of Artificial Sequence: Synthetic oligonucleotide
gtagctcctctagtggcggcta

SEQ ID NO: 1887 - DNA, 22 bp, Artificial Sequence
  Description of Artificial Sequence: Synthetic oligonucleotide
tagctcctctagtggcggctat

SEQ ID NO: 1888 - DNA, 22 bp, Artificial Sequence
  Description of Artificial Sequence: Synthetic oligonucleotide
agctcctctagtggcggctatt

SEQ ID NO: 1889 - DNA, 22 bp, Artificial Sequence
  Description of Artificial Sequence: Synthetic oligonucleotide
gctcctctagtggcggctattg

SEQ ID NO: 1890 - DNA, 22 bp, Artificial Sequence
  Description of Artificial Sequence: Synthetic oligonucleotide
ctcctctagtggcggctattga

SEQ ID NO: 1891 - DNA, 22 bp, Artificial Sequence
  Description of Artificial Sequence: Synthetic oligonucleotide
tcctctagtggcggctattgat

SEQ ID NO: 1892 - DNA, 22 bp, Artificial Sequence
  Description of Artificial Sequence: Synthetic oligonucleotide
cctctagtggcggctattgatt

SEQ ID NO: 1893 - DNA, 22 bp, Artificial Sequence
  Description of Artificial Sequence: Synthetic oligonucleotide
acagtagctcctctagtggcgg

SEQ ID NO: 1894 - DNA, 22 bp, Artificial Sequence
  Description of Artificial Sequence: Synthetic oligonucleotide
cagtagctcctctagtggcggc

SEQ ID NO: 1895 - DNA, 22 bp, Artificial Sequence
  Description of Artificial Sequence: Synthetic oligonucleotide
ggtcattagcacaagttgtagg

SEQ ID NO: 1896 - DNA, 22 bp, Artificial Sequence
  Description of Artificial Sequence: Synthetic oligonucleotide
gtcattagcacaagttgtaggt

SEQ ID NO: 1897 - DNA, 22 bp, Artificial Sequence
  Description of Artificial Sequence: Synthetic oligonucleotide
gggtcattagcacaagttgtag

SEQ ID NO: 1898 - DNA, 22 bp, Artificial Sequence
  Description of Artificial Sequence: Synthetic oligonucleotide
attagcacaagttgtaggtatt

SEQ ID NO: 1899 - DNA, 22 bp, Artificial Sequence
  Description of Artificial Sequence: Synthetic oligonucleotide
ttagcacaagttgtaggtattt

SEQ ID NO: 1900 - DNA, 22 bp, Artificial Sequence
  Description of Artificial Sequence: Synthetic oligonucleotide
tcattagcacaagttgtaggta

SEQ ID NO: 1901 - DNA, 22 bp, Artificial Sequence
  Description of Artificial Sequence: Synthetic oligonucleotide
cattagcacaagttgtaggtat

SEQ ID NO: 1902 - DNA, 22 bp, Artificial Sequence
  Description of Artificial Sequence: Synthetic oligonucleotide
ctcttaccagtaccaggtggtc

SEQ ID NO: 1903 - DNA, 22 bp, Artificial Sequence
  Description of Artificial Sequence: Synthetic oligonucleotide
actcttaccagtaccaggtggt

SEQ ID NO: 1904 - DNA, 22 bp, Artificial Sequence
  Description of Artificial Sequence: Synthetic oligonucleotide
aaatgactcttaccagtaccag

SEQ ID NO: 1905 - DNA, 22 bp, Artificial Sequence
  Description of Artificial Sequence: Synthetic oligonucleotide
aaaatgactcttaccagtacca

SEQ ID NO: 1906 - DNA, 22 bp, Artificial Sequence
  Description of Artificial Sequence: Synthetic oligonucleotide
atgactcttaccagtaccaggt

SEQ ID NO: 1907 - DNA, 22 bp, Artificial Sequence
  Description of Artificial Sequence: Synthetic oligonucleotide
aatgactcttaccagtaccagg

SEQ ID NO: 1908 - DNA, 22 bp, Artificial Sequence
  Description of Artificial Sequence: Synthetic oligonucleotide
accgttcaatcataagtgtacc

SEQ ID NO: 1909 - DNA, 22 bp, Artificial Sequence
  Description of Artificial Sequence: Synthetic oligonucleotide
atcataagtgtaccatctgttt

SEQ ID NO: 1910 - DNA, 22 bp, Artificial Sequence
  Description of Artificial Sequence: Synthetic oligonucleotide
aatcataagtgtaccatctgtt

SEQ ID NO: 1911 - DNA, 22 bp, Artificial Sequence
  Description of Artificial Sequence: Synthetic oligonucleotide
caatcataagtgtaccatctgt

SEQ ID NO: 1912 - DNA, 22 bp, Artificial Sequence
  Description of Artificial Sequence: Synthetic oligonucleotide
tcaatcataagtgtaccatctg

SEQ ID NO: 1913 - DNA, 22 bp, Artificial Sequence
  Description of Artificial Sequence: Synthetic oligonucleotide
ttcaatcataagtgtaccatct

SEQ ID NO: 1914 - DNA, 22 bp, Artificial Sequence
  Description of Artificial Sequence: Synthetic oligonucleotide
gttcaatcataagtgtaccatc

SEQ ID NO: 1915 - DNA, 22 bp, Artificial Sequence
  Description of Artificial Sequence: Synthetic oligonucleotide
cgttcaatcataagtgtaccat

SEQ ID NO: 1916 - DNA, 22 bp, Artificial Sequence
  Description of Artificial Sequence: Synthetic oligonucleotide
gcagcaagcacaaaacaagcta

SEQ ID NO: 1917 - DNA, 22 bp, Artificial Sequence
  Description of Artificial Sequence: Synthetic oligonucleotide
gagtacataagttcgtactcat

SEQ ID NO: 1918 - DNA, 22 bp, Artificial Sequence
  Description of Artificial Sequence: Synthetic oligonucleotide
tgagtacataagttcgtactca

SEQ ID NO: 1919 - DNA, 22 bp, Artificial Sequence
  Description of Artificial Sequence: Synthetic oligonucleotide
cctcttgtctgatgaacagttt

SEQ ID NO: 1920 - DNA, 22 bp, Artificial Sequence
  Description of Artificial Sequence: Synthetic oligonucleotide
tcctcttgtctgatgaacagtt

SEQ ID NO: 1921 - DNA, 22 bp, Artificial Sequence
  Description of Artificial Sequence: Synthetic oligonucleotide
tttctacatcactataaacagt

SEQ ID NO: 1922 - DNA, 22 bp, Artificial Sequence
  Description of Artificial Sequence: Synthetic oligonucleotide
aatcccaacccataaggtgagg

SEQ ID NO: 1923 - DNA, 22 bp, Artificial Sequence
  Description of Artificial Sequence: Synthetic oligonucleotide
taatcccaacccataaggtgag

SEQ ID NO: 1924 - DNA, 22 bp, Artificial Sequence
  Description of Artificial Sequence: Synthetic oligonucleotide
ataatcccaacccataaggtga

SEQ ID NO: 1925 - DNA, 22 bp, Artificial Sequence
  Description of Artificial Sequence: Synthetic oligonucleotide
gataatcccaacccataaggtg

SEQ ID NO: 1926 - DNA, 22 bp, Artificial Sequence
  Description of Artificial Sequence: Synthetic oligonucleotide
ggataatcccaacccataaggt

SEQ ID NO: 1927 - DNA, 22 bp, Artificial Sequence
  Description of Artificial Sequence: Synthetic oligonucleotide
ccatttaatagaagttaaacca

SEQ ID NO: 1928 - DNA, 22 bp, Artificial Sequence
  Description of Artificial Sequence: Synthetic oligonucleotide
cccatttaatagaagttaaacc

SEQ ID NO: 1929 - DNA, 22 bp, Artificial Sequence
  Description of Artificial Sequence: Synthetic oligonucleotide
gcccatttaatagaagttaaac

SEQ ID NO: 1930 - DNA, 22 bp, Artificial Sequence
  Description of Artificial Sequence: Synthetic oligonucleotide
aaattcagatttagccacattc

SEQ ID NO: 1931 - DNA, 22 bp, Artificial Sequence
  Description of Artificial Sequence: Synthetic oligonucleotide
aattcagatttagccacattca

SEQ ID NO: 1932 - DNA, 22 bp, Artificial Sequence
  Description of Artificial Sequence: Synthetic oligonucleotide
atttagccacattcaaagactt

SEQ ID NO: 1933 - DNA, 22 bp, Artificial Sequence
  Description of Artificial Sequence: Synthetic oligonucleotide
agatttagccacattcaaagac

SEQ ID NO: 1934 - DNA, 22 bp, Artificial Sequence
  Description of Artificial Sequence: Synthetic oligonucleotide
gatttagccacattcaaagact

SEQ ID NO: 1935 - DNA, 22 bp, Artificial Sequence
  Description of Artificial Sequence: Synthetic oligonucleotide
tcagatttagccacattcaaag

SEQ ID NO: 1936 - DNA, 22 bp, Artificial Sequence
  Description of Artificial Sequence: Synthetic oligonucleotide
cagatttagccacattcaaaga

SEQ ID NO: 1937 - DNA, 22 bp, Artificial Sequence
  Description of Artificial Sequence: Synthetic oligonucleotide
attcagatttagccacattcaa

SEQ ID NO: 1938 - DNA, 22 bp, Artificial Sequence
  Description of Artificial Sequence: Synthetic oligonucleotide
ggcgtacacgttcacctaagtt

SEQ ID NO: 1939 - DNA, 22 bp, Artificial Sequence
  Description of Artificial Sequence: Synthetic oligonucleotide
tggcgtacacgttcacctaagt

SEQ ID NO: 1940 - DNA, 22 bp, Artificial Sequence
  Description of Artificial Sequence: Synthetic oligonucleotide
ttggcgtacacgttcacctaag

SEQ ID NO: 1941 - DNA, 22 bp, Artificial Sequence
  Description of Artificial Sequence: Synthetic oligonucleotide
tgagaagaatgttagtttctgg

SEQ ID NO: 1942 - DNA, 22 bp, Artificial Sequence
  Description of Artificial Sequence: Synthetic oligonucleotide
ttgagaagaatgttagtttctg

SEQ ID NO: 1943 - DNA, 22 bp, Artificial Sequence
  Description of Artificial Sequence: Synthetic oligonucleotide
aacaatttcagcaggacaacgc

SEQ ID NO: 1944 - DNA, 22 bp, Artificial Sequence
  Description of Artificial Sequence: Synthetic oligonucleotide
acaatttcagcaggacaacgcc

SEQ ID NO: 1945 - DNA, 22 bp, Artificial Sequence
  Description of Artificial Sequence: Synthetic oligonucleotide
caatttcagcaggacaacgccg

SEQ ID NO: 1946 - DNA, 22 bp, Artificial Sequence
  Description of Artificial Sequence: Synthetic oligonucleotide
aatttcagcaggacaacgccga

SEQ ID NO: 1947 - DNA, 22 bp, Artificial Sequence
  Description of Artificial Sequence: Synthetic oligonucleotide
atttcagcaggacaacgccgac

SEQ ID NO: 1948 - DNA, 22 bp, Artificial Sequence
  Description of Artificial Sequence: Synthetic oligonucleotide
tttcagcaggacaacgccgaca

SEQ ID NO: 1949 - DNA, 22 bp, Artificial Sequence
  Description of Artificial Sequence: Synthetic oligonucleotide
ttcagcaggacaacgccgacaa

SEQ ID NO: 1950 - DNA, 22 bp, Artificial Sequence
  Description of Artificial Sequence: Synthetic oligonucleotide
gtcaacaatttcagcaggacaa

SEQ ID NO: 1951 - DNA, 22 bp, Artificial Sequence
  Description of Artificial Sequence: Synthetic oligonucleotide
tcaacaatttcagcaggacaac

SEQ ID NO: 1952 - DNA, 22 bp, Artificial Sequence
  Description of Artificial Sequence: Synthetic oligonucleotide
ctgaattgaaatattctggttc

SEQ ID NO: 1953 - DNA, 22 bp, Artificial Sequence
  Description of Artificial Sequence: Synthetic oligonucleotide
ttcttacgaagaagaaccttgc

SEQ ID NO: 1954 - DNA, 22 bp, Artificial Sequence
  Description of Artificial Sequence: Synthetic oligonucleotide
tcttacgaagaagaaccttgcg

SEQ ID NO: 1955 - DNA, 22 bp, Artificial Sequence
  Description of Artificial Sequence: Synthetic oligonucleotide
cttacgaagaagaaccttgcgg

SEQ ID NO: 1956 - DNA, 22 bp, Artificial Sequence
  Description of Artificial Sequence: Synthetic oligonucleotide
ttacgaagaagaaccttgcggt

SEQ ID NO: 1957 - DNA, 22 bp, Artificial Sequence
  Description of Artificial Sequence: Synthetic oligonucleotide
accgttcttacgaagaagaacc

SEQ ID NO: 1958 - DNA, 22 bp, Artificial Sequence
  Description of Artificial Sequence: Synthetic oligonucleotide
ccgttcttacgaagaagaacct

SEQ ID NO: 1959 - DNA, 22 bp, Artificial Sequence
  Description of Artificial Sequence: Synthetic oligonucleotide
cgttcttacgaagaagaacctt

SEQ ID NO: 1960 - DNA, 22 bp, Artificial Sequence
  Description of Artificial Sequence: Synthetic oligonucleotide
gttcttacgaagaagaaccttg

SEQ ID NO: 1961 - DNA, 22 bp, Artificial Sequence
  Description of Artificial Sequence: Synthetic oligonucleotide
ttaccgttcttacgaagaagaa

SEQ ID NO: 1962 - DNA, 22 bp, Artificial Sequence
  Description of Artificial Sequence: Synthetic oligonucleotide
taccgttcttacgaagaagaac

SEQ ID NO: 1963 - DNA, 22 bp, Artificial Sequence
  Description of Artificial Sequence: Synthetic oligonucleotide
ataggcagctctccctagcatt

SEQ ID NO: 1964 - DNA, 22 bp, Artificial Sequence
  Description of Artificial Sequence: Synthetic oligonucleotide
tataggcagctctccctagcat

SEQ ID NO: 1965 - DNA, 22 bp, Artificial Sequence
  Description of Artificial Sequence: Synthetic oligonucleotide
atataggcagctctccctagca

SEQ ID NO: 1966 - DNA, 22 bp, Artificial Sequence
  Description of Artificial Sequence: Synthetic oligonucleotide
cctgtgatgaatcaacagtttg

SEQ ID NO: 1967 - DNA, 22 bp, Artificial Sequence
  Description of Artificial Sequence: Synthetic oligonucleotide
gagccctgtgatgaatcaacag

SEQ ID NO: 1968 - DNA, 22 bp, Artificial Sequence
  Description of Artificial Sequence: Synthetic oligonucleotide
cacaagacatctgtcgtagtgc

SEQ ID NO: 1969 - DNA, 22 bp, Artificial Sequence
  Description of Artificial Sequence: Synthetic oligonucleotide
ccctgtgatgaatcaacagttt

SEQ ID NO: 1970 - DNA, 22 bp, Artificial Sequence
  Description of Artificial Sequence: Synthetic oligonucleotide
cagcaaagtcatagaagtcttt

SEQ ID NO: 1971 - DNA, 22 bp, Artificial Sequence
  Description of Artificial Sequence: Synthetic oligonucleotide
caccaaagcataaatgaaattt

SEQ ID NO: 1972 - DNA, 22 bp, Artificial Sequence
  Description of Artificial Sequence: Synthetic oligonucleotide
accaaagcataaatgaaatttc

SEQ ID NO: 1973 - DNA, 22 bp, Artificial Sequence
  Description of Artificial Sequence: Synthetic oligonucleotide
tacaccaaagcataaatgaaat

SEQ ID NO: 1974 - DNA, 22 bp, Artificial Sequence
  Description of Artificial Sequence: Synthetic oligonucleotide
acaccaaagcataaatgaaatt

SEQ ID NO: 1975 - DNA, 22 bp, Artificial Sequence
  Description of Artificial Sequence: Synthetic oligonucleotide
ttacaccaaagcataaatgaaa

SEQ ID NO: 1976 - DNA, 22 bp, Artificial Sequence
  Description of Artificial Sequence: Synthetic oligonucleotide
agtcaacgagatgaaacatctg

SEQ ID NO: 1977 - DNA, 22 bp, Artificial Sequence
  Description of Artificial Sequence: Synthetic oligonucleotide
gtcaacgagatgaaacatctgt

SEQ ID NO: 1978 - DNA, 22 bp, Artificial Sequence
  Description of Artificial Sequence: Synthetic oligonucleotide
tcaacgagatgaaacatctgtt

SEQ ID NO: 1979 - DNA, 22 bp, Artificial Sequence
  Description of Artificial Sequence: Synthetic oligonucleotide
caacgagatgaaacatctgttg

SEQ ID NO: 1980 - DNA, 22 bp, Artificial Sequence
  Description of Artificial Sequence: Synthetic oligonucleotide
aagtcaacgagatgaaacatct

SEQ ID NO: 1981 - DNA, 22 bp, Artificial Sequence
  Description of Artificial Sequence: Synthetic oligonucleotide
catccgaaagggagtgaggctt

SEQ ID NO: 1982 - DNA, 22 bp, Artificial Sequence
  Description of Artificial Sequence: Synthetic oligonucleotide
ccatccgaaagggagtgaggct

SEQ ID NO: 1983 - DNA, 22 bp, Artificial Sequence
  Description of Artificial Sequence: Synthetic oligonucleotide
gccatccgaaagggagtgaggc

SEQ ID NO: 1984 - DNA, 22 bp, Artificial Sequence
  Description of Artificial Sequence: Synthetic oligonucleotide
agccatccgaaagggagtgagg

SEQ ID NO: 1985 - DNA, 22 bp, Artificial Sequence
  Description of Artificial Sequence: Synthetic oligonucleotide
cgaaagggagtgaggcttgtat

SEQ ID NO: 1986 - DNA, 22 bp, Artificial Sequence
  Description of Artificial Sequence: Synthetic oligonucleotide
ccgaaagggagtgaggcttgta

SEQ ID NO: 1987 - DNA, 22 bp, Artificial Sequence
  Description of Artificial Sequence: Synthetic oligonucleotide
tccgaaagggagtgaggcttgt

SEQ ID NO: 1988 - DNA, 22 bp, Artificial Sequence
  Description of Artificial Sequence: Synthetic oligonucleotide
atccgaaagggagtgaggcttg

SEQ ID NO: 1989 - DNA, 22 bp, Artificial Sequence
  Description of Artificial Sequence: Synthetic oligonucleotide
aagccatccgaaagggagtgag

SEQ ID NO: 1990 - DNA, 22 bp, Artificial Sequence
  Description of Artificial Sequence: Synthetic oligonucleotide
taagccatccgaaagggagtga

SEQ ID NO: 1991 - DNA, 22 bp, Artificial Sequence
  Description of Artificial Sequence: Synthetic oligonucleotide
taaagatcagcattccaagaat

SEQ ID NO: 1992 - DNA, 22 bp, Artificial Sequence
  Description of Artificial Sequence: Synthetic oligonucleotide
gcaacctcattgaggcggtcaa

SEQ ID NO: 1993 - DNA, 22 bp, Artificial Sequence
  Description of Artificial Sequence: Synthetic oligonucleotide
ctcattgaggcggtcaatttct

SEQ ID NO: 1994 - DNA, 22 bp, Artificial Sequence
  Description of Artificial Sequence: Synthetic oligonucleotide
tcattgaggcggtcaatttctt

SEQ ID NO: 1995 - DNA, 22 bp, Artificial Sequence
  Description of Artificial Sequence: Synthetic oligonucleotide
cattgaggcggtcaatttcttt

SEQ ID NO: 1996 - DNA, 22 bp, Artificial Sequence
  Description of Artificial Sequence: Synthetic oligonucleotide
caacctcattgaggcggtcaat

SEQ ID NO: 1997 - DNA, 22 bp, Artificial Sequence
  Description of Artificial Sequence: Synthetic oligonucleotide
aacctcattgaggcggtcaatt

SEQ ID NO: 1998 - DNA, 22 bp, Artificial Sequence
  Description of Artificial Sequence: Synthetic oligonucleotide
acctcattgaggcggtcaattt

SEQ ID NO: 1999 - DNA, 22 bp, Artificial Sequence
  Description of Artificial Sequence: Synthetic oligonucleotide
cctcattgaggcggtcaatttc

SEQ ID NO: 2000 - DNA, 22 bp, Artificial Sequence
  Description of Artificial Sequence: Synthetic oligonucleotide
gcagcagtacgcacacaatcga

SEQ ID NO: 2001 - DNA, 22 bp, Artificial Sequence
  Description of Artificial Sequence: Synthetic oligonucleotide
tgcagcagtacgcacacaatcg

SEQ ID NO: 2002 - DNA, 22 bp, Artificial Sequence
  Description of Artificial Sequence: Synthetic oligonucleotide
tattgcagcagtacgcacacaa

SEQ ID NO: 2003 - DNA, 22 bp, Artificial Sequence
  Description of Artificial Sequence: Synthetic oligonucleotide
atattgcagcagtacgcacaca

SEQ ID NO: 2004 - DNA, 22 bp, Artificial Sequence
  Description of Artificial Sequence: Synthetic oligonucleotide
aatattgcagcagtacgcacac

SEQ ID NO: 2005 - DNA, 22 bp, Artificial Sequence
  Description of Artificial Sequence: Synthetic oligonucleotide
caatattgcagcagtacgcaca

SEQ ID NO: 2006 - DNA, 22 bp, Artificial Sequence
  Description of Artificial Sequence: Synthetic oligonucleotide
aacaatattgcagcagtacgca

SEQ ID NO: 2007 - DNA, 22 bp, Artificial Sequence
  Description of Artificial Sequence: Synthetic oligonucleotide
aaacaacagcatcaccatagtc

SEQ ID NO: 2008 - DNA, 22 bp, Artificial Sequence
  Description of Artificial Sequence: Synthetic oligonucleotide
gcagaaaggctaaaaagcacaa

SEQ ID NO: 2009 - DNA, 22 bp, Artificial Sequence
  Description of Artificial Sequence: Synthetic oligonucleotide
agcagaaaggctaaaaagcaca

SEQ ID NO: 2010 - DNA, 22 bp, Artificial Sequence
  Description of Artificial Sequence: Synthetic oligonucleotide
tagcagaaaggctaaaaagcac

SEQ ID NO: 2011 - DNA, 22 bp, Artificial Sequence
  Description of Artificial Sequence: Synthetic oligonucleotide
atagcagaaaggctaaaaagca

SEQ ID NO: 2012 - DNA, 22 bp, Artificial Sequence
  Description of Artificial Sequence: Synthetic oligonucleotide
aaaggctaaaaagcacaaatag

SEQ ID NO: 2013 - DNA, 22 bp, Artificial Sequence
  Description of Artificial Sequence: Synthetic oligonucleotide
cagaaaggctaaaaagcacaaa

SEQ ID NO: 2014 - DNA, 22 bp, Artificial Sequence
  Description of Artificial Sequence: Synthetic oligonucleotide
aatagcagaaaggctaaaaagc

SEQ ID NO: 2015 - DNA, 22 bp, Artificial Sequence
  Description of Artificial Sequence: Synthetic oligonucleotide
gaatagcagaaaggctaaaaag

SEQ ID NO: 2016 - DNA, 22 bp, Artificial Sequence
  Description of Artificial Sequence: Synthetic oligonucleotide
ttggtgtattcaaggctccctc

SEQ ID NO: 2017 - DNA, 22 bp, Artificial Sequence
  Description of Artificial Sequence: Synthetic oligonucleotide
tttggtgtattcaaggctccct

SEQ ID NO: 2018 - DNA, 22 bp, Artificial Sequence
  Description of Artificial Sequence: Synthetic oligonucleotide
tattcaaggctccctcagttgc

SEQ ID NO: 2019 - DNA, 22 bp, Artificial Sequence
  Description of Artificial Sequence: Synthetic oligonucleotide
gtattcaaggctccctcagttg

SEQ ID NO: 2020 - DNA, 22 bp, Artificial Sequence
  Description of Artificial Sequence: Synthetic oligonucleotide
ttcaaggctccctcagttgcaa

SEQ ID NO: 2021 - DNA, 22 bp, Artificial Sequence
  Description of Artificial Sequence: Synthetic oligonucleotide
attcaaggctccctcagttgca

SEQ ID NO: 2022 - DNA, 22 bp, Artificial Sequence
  Description of Artificial Sequence: Synthetic oligonucleotide
ggtgtattcaaggctccctcag

SEQ ID NO: 2023 - DNA, 22 bp, Artificial Sequence
  Description of Artificial Sequence: Synthetic oligonucleotide
tggtgtattcaaggctccctca

SEQ ID NO: 2024 - DNA, 22 bp, Artificial Sequence
  Description of Artificial Sequence: Synthetic oligonucleotide
tgtattcaaggctccctcagtt

SEQ ID NO: 2025 - DNA, 22 bp, Artificial Sequence
  Description of Artificial Sequence: Synthetic oligonucleotide
gtgtattcaaggctccctcagt

SEQ ID NO: 2026 - DNA, 22 bp, Artificial Sequence
  Description of Artificial Sequence: Synthetic oligonucleotide
gaattgccctcgtatgttccag

SEQ ID NO: 2027 - DNA, 22 bp, Artificial Sequence
  Description of Artificial Sequence: Synthetic oligonucleotide
aattgccctcgtatgttccaga

SEQ ID NO: 2028 - DNA, 22 bp, Artificial Sequence
  Description of Artificial Sequence: Synthetic oligonucleotide
atagtgctcttgtggcactagt

SEQ ID NO: 2029 - DNA, 22 bp, Artificial Sequence
  Description of Artificial Sequence: Synthetic oligonucleotide
catagtgctcttgtggcactag

SEQ ID NO: 2030 - DNA, 22 bp, Artificial Sequence
  Description of Artificial Sequence: Synthetic oligonucleotide
ctcttgtggcactagtgtaggt

SEQ ID NO: 2031 - DNA, 22 bp, Artificial Sequence
  Description of Artificial Sequence: Synthetic oligonucleotide
gctcttgtggcactagtgtagg

SEQ ID NO: 2032 - DNA, 22 bp, Artificial Sequence
  Description of Artificial Sequence: Synthetic oligonucleotide
cttgtggcactagtgtaggtgc

SEQ ID NO: 2033 - DNA, 22 bp, Artificial Sequence
  Description of Artificial Sequence: Synthetic oligonucleotide
tcttgtggcactagtgtaggtg

SEQ ID NO: 2034 - DNA, 22 bp, Artificial Sequence
  Description of Artificial Sequence: Synthetic oligonucleotide
agtgctcttgtggcactagtgt

SEQ ID NO: 2035 - DNA, 22 bp, Artificial Sequence
  Description of Artificial Sequence: Synthetic oligonucleotide
tagtgctcttgtggcactagtg

SEQ ID NO: 2036 - DNA, 22 bp, Artificial Sequence
  Description of Artificial Sequence: Synthetic oligonucleotide
tgctcttgtggcactagtgtag

SEQ ID NO: 2037 - DNA, 22 bp, Artificial Sequence
  Description of Artificial Sequence: Synthetic oligonucleotide
gtgctcttgtggcactagtgta

SEQ ID NO: 2038 - DNA, 22 bp, Artificial Sequence
  Description of Artificial Sequence: Synthetic oligonucleotide
ctttgagcgtttctgctgcaaa

SEQ ID NO: 2039 - DNA, 22 bp, Artificial Sequence
  Description of Artificial Sequence: Synthetic oligonucleotide
gctttgagcgtttctgctgcaa

SEQ ID NO: 2040 - DNA, 22 bp, Artificial Sequence
  Description of Artificial Sequence: Synthetic oligonucleotide
gagcgtttctgctgcaaaaagc

SEQ ID NO: 2041 - DNA, 22 bp, Artificial Sequence
  Description of Artificial Sequence: Synthetic oligonucleotide
tgagcgtttctgctgcaaaaag

SEQ ID NO: 2042 - DNA, 22 bp, Artificial Sequence
  Description of Artificial Sequence: Synthetic oligonucleotide
ttgagcgtttctgctgcaaaaa

SEQ ID NO: 2043 - DNA, 22 bp, Artificial Sequence
  Description of Artificial Sequence: Synthetic oligonucleotide
tttgagcgtttctgctgcaaaa

SEQ ID NO: 2044 - DNA, 22 bp, Artificial Sequence
  Description of Artificial Sequence: Synthetic oligonucleotide
gtttctgctgcaaaaagcttga

SEQ ID NO: 2045 - DNA, 22 bp, Artificial Sequence
  Description of Artificial Sequence: Synthetic oligonucleotide
cgtttctgctgcaaaaagcttg

SEQ ID NO: 2046 - DNA, 22 bp, Artificial Sequence
  Description of Artificial Sequence: Synthetic oligonucleotide
gcgtttctgctgcaaaaagctt

SEQ ID NO: 2047 - DNA, 22 bp, Artificial Sequence
  Description of Artificial Sequence: Synthetic oligonucleotide
agcgtttctgctgcaaaaagct

SEQ ID NO: 2048 - DNA, 22 bp, Artificial Sequence
  Description of Artificial Sequence: Synthetic oligonucleotide
cctgtttaactagcattgtatg

SEQ ID NO: 2049 - DNA, 22 bp, Artificial Sequence
  Description of Artificial Sequence: Synthetic oligonucleotide
ccctgtttaactagcattgtat

SEQ ID NO: 2050 - DNA, 22 bp, Artificial Sequence
  Description of Artificial Sequence: Synthetic oligonucleotide
caccacctaaattgcaacgtgt

SEQ ID NO: 2051 - DNA, 22 bp, Artificial Sequence
  Description of Artificial Sequence: Synthetic oligonucleotide
agcaggtggtgctgacatcata

SEQ ID NO: 2052 - DNA, 22 bp, Artificial Sequence
  Description of Artificial Sequence: Synthetic oligonucleotide
aggtggtgctgacatcataaca

SEQ ID NO: 2053 - DNA, 22 bp, Artificial Sequence
  Description of Artificial Sequence: Synthetic oligonucleotide
catacttaagattcatttgagt

SEQ ID NO: 2054 - DNA, 22 bp, Artificial Sequence
  Description of Artificial Sequence: Synthetic oligonucleotide
gcatacttaagattcatttgag

SEQ ID NO: 2055 - DNA, 22 bp, Artificial Sequence
  Description of Artificial Sequence: Synthetic oligonucleotide
taagattcatttgagttatagt

SEQ ID NO: 2056 - DNA, 22 bp, Artificial Sequence
  Description of Artificial Sequence: Synthetic oligonucleotide
ttaagattcatttgagttatag

SEQ ID NO: 2057 - DNA, 22 bp, Artificial Sequence
  Description of Artificial Sequence: Synthetic oligonucleotide
agattcatttgagttatagtag

SEQ ID NO: 2058 - DNA, 22 bp, Artificial Sequence
  Description of Artificial Sequence: Synthetic oligonucleotide
aagattcatttgagttatagta

SEQ ID NO: 2059 - DNA, 22 bp, Artificial Sequence
  Description of Artificial Sequence: Synthetic oligonucleotide
tacttaagattcatttgagtta

SEQ ID NO: 2060 - DNA, 22 bp, Artificial Sequence
  Description of Artificial Sequence: Synthetic oligonucleotide
atacttaagattcatttgagtt

SEQ ID NO: 2061 - DNA, 22 bp, Artificial Sequence
  Description of Artificial Sequence: Synthetic oligonucleotide
cttaagattcatttgagttata

SEQ ID NO: 2062 - DNA, 22 bp, Artificial Sequence
  Description of Artificial Sequence: Synthetic oligonucleotide
acttaagattcatttgagttat

SEQ ID NO: 2063 - DNA, 22 bp, Artificial Sequence
  Description of Artificial Sequence: Synthetic oligonucleotide
tggtatccagttgaaactacaa

SEQ ID NO: 2064 - DNA, 22 bp, Artificial Sequence
  Description of Artificial Sequence: Synthetic oligonucleotide
ggtatccagttgaaactacaaa

SEQ ID NO: 2065 - DNA, 22 bp, Artificial Sequence
  Description of Artificial Sequence: Synthetic oligonucleotide
aggttgcaaaggatcataaact

SEQ ID NO: 2066 - DNA, 22 bp, Artificial Sequence
  Description of Artificial Sequence: Synthetic oligonucleotide
caggttgcaaaggatcataaac

SEQ ID NO: 2067 - DNA, 22 bp, Artificial Sequence
  Description of Artificial Sequence: Synthetic oligonucleotide
aaggatcataaactgtgttgtt

SEQ ID NO: 2068 - DNA, 22 bp, Artificial Sequence
  Description of Artificial Sequence: Synthetic oligonucleotide
aaaggatcataaactgtgttgt

SEQ ID NO: 2069 - DNA, 22 bp, Artificial Sequence
  Description of Artificial Sequence: Synthetic oligonucleotide
caaaggatcataaactgtgttg

SEQ ID NO: 2070 - DNA, 22 bp, Artificial Sequence
  Description of Artificial Sequence: Synthetic oligonucleotide
gcaaaggatcataaactgtgtt

SEQ ID NO: 2071 - DNA, 22 bp, Artificial Sequence
  Description of Artificial Sequence: Synthetic oligonucleotide
tgcaaaggatcataaactgtgt

SEQ ID NO: 2072 - DNA, 22 bp, Artificial Sequence
  Description of Artificial Sequence: Synthetic oligonucleotide
ttgcaaaggatcataaactgtg

SEQ ID NO: 2073 - DNA, 22 bp, Artificial Sequence
  Description of Artificial Sequence: Synthetic oligonucleotide
gttgcaaaggatcataaactgt

SEQ ID NO: 2074 - DNA, 22 bp, Artificial Sequence
  Description of Artificial Sequence: Synthetic oligonucleotide
ggttgcaaaggatcataaactg

SEQ ID NO: 2075 - DNA, 22 bp, Artificial Sequence
  Description of Artificial Sequence: Synthetic oligonucleotide
gttacacactgattaaagattg

SEQ ID NO: 2076 - DNA, 22 bp, Artificial Sequence
  Description of Artificial Sequence: Synthetic oligonucleotide
tgttacacactgattaaagatt

SEQ ID NO: 2077 - DNA, 22 bp, Artificial Sequence
  Description of Artificial Sequence: Synthetic oligonucleotide
ctgattaaagattgctatgtga

SEQ ID NO: 2078 - DNA, 22 bp, Artificial Sequence
  Description of Artificial Sequence: Synthetic oligonucleotide
actgattaaagattgctatgtg

SEQ ID NO: 2079 - DNA, 22 bp, Artificial Sequence
  Description of Artificial Sequence: Synthetic oligonucleotide
cactgattaaagattgctatgt

SEQ ID NO: 2080 - DNA, 22 bp, Artificial Sequence
  Description of Artificial Sequence: Synthetic oligonucleotide
acactgattaaagattgctatg

SEQ ID NO: 2081 - DNA, 22 bp, Artificial Sequence
  Description of Artificial Sequence: Synthetic oligonucleotide
cacactgattaaagattgctat

SEQ ID NO: 2082 - DNA, 22 bp, Artificial Sequence
  Description of Artificial Sequence: Synthetic oligonucleotide
acacactgattaaagattgcta

SEQ ID NO: 2083 - DNA, 22 bp, Artificial Sequence
  Description of Artificial Sequence: Synthetic oligonucleotide
tacacactgattaaagattgct

SEQ ID NO: 2084 - DNA, 22 bp, Artificial Sequence
  Description of Artificial Sequence: Synthetic oligonucleotide
ttacacactgattaaagattgc

SEQ ID NO: 2085 - DNA, 22 bp, Artificial Sequence
  Description of Artificial Sequence: Synthetic oligonucleotide
tccttccttaaagaaaccctta

SEQ ID NO: 2086 - DNA, 22 bp, Artificial Sequence
  Description of Artificial Sequence: Synthetic oligonucleotide
ccttccttaaagaaacccttag

SEQ ID NO: 2087 - DNA, 22 bp, Artificial Sequence
  Description of Artificial Sequence: Synthetic oligonucleotide
cttccttaaagaaacccttaga

SEQ ID NO: 2088 - DNA, 22 bp, Artificial Sequence
  Description of Artificial Sequence: Synthetic oligonucleotide
ttccttaaagaaacccttagac

SEQ ID NO: 2089 - DNA, 22 bp, Artificial Sequence
  Description of Artificial Sequence: Synthetic oligonucleotide
aacttccttccttaaagaaacc

SEQ ID NO: 2090 - DNA, 22 bp, Artificial Sequence
  Description of Artificial Sequence: Synthetic oligonucleotide
acttccttccttaaagaaaccc

SEQ ID NO: 2091 - DNA, 22 bp, Artificial Sequence
  Description of Artificial Sequence: Synthetic oligonucleotide
cttccttccttaaagaaaccct

SEQ ID NO: 2092 - DNA, 22 bp, Artificial Sequence
  Description of Artificial Sequence: Synthetic oligonucleotide
ttccttccttaaagaaaccctt

SEQ ID NO: 2093 - DNA, 22 bp, Artificial Sequence
  Description of Artificial Sequence: Synthetic oligonucleotide
agaacttccttccttaaagaaa

SEQ ID NO: 2094 - DNA, 22 bp, Artificial Sequence
  Description of Artificial Sequence: Synthetic oligonucleotide
gaacttccttccttaaagaaac

SEQ ID NO: 2095 - DNA, 22 bp, Artificial Sequence
  Description of Artificial Sequence: Synthetic oligonucleotide
aaatccataagttcgtttatgt

SEQ ID NO: 2096 - DNA, 22 bp, Artificial Sequence
  Description of Artificial Sequence: Synthetic oligonucleotide
caaatccataagttcgtttatg

SEQ ID NO: 2097 - DNA, 22 bp, Artificial Sequence
  Description of Artificial Sequence: Synthetic oligonucleotide
atccataagttcgtttatgtgt

SEQ ID NO: 2098 - DNA, 22 bp, Artificial Sequence
  Description of Artificial Sequence: Synthetic oligonucleotide
aatccataagttcgtttatgtg

SEQ ID NO: 2099 - DNA, 22 bp, Artificial Sequence
  Description of Artificial Sequence: Synthetic oligonucleotide
ttgacaacactcaaatcataat

SEQ ID NO: 2100 - DNA, 22 bp, Artificial Sequence
  Description of Artificial Sequence: Synthetic oligonucleotide
gcattgacaacactcaaatcat

SEQ ID NO: 2101 - DNA, 22 bp, Artificial Sequence
  Description of Artificial Sequence: Synthetic oligonucleotide
attgacaacactcaaatcataa

SEQ ID NO: 2102 - DNA, 22 bp, Artificial Sequence
  Description of Artificial Sequence: Synthetic oligonucleotide
cattgacaacactcaaatcata

SEQ ID NO: 2103 - DNA, 22 bp, Artificial Sequence
  Description of Artificial Sequence: Synthetic oligonucleotide
taattctactacatttatctat

SEQ ID NO: 2104 - DNA, 22 bp, Artificial Sequence
  Description of Artificial Sequence: Synthetic oligonucleotide
ttctactacatttatctatagg

SEQ ID NO: 2105 - DNA, 22 bp, Artificial Sequence
  Description of Artificial Sequence: Synthetic oligonucleotide
attctactacatttatctatag

SEQ ID NO: 2106 - DNA, 22 bp, Artificial Sequence
  Description of Artificial Sequence: Synthetic oligonucleotide
ctactacatttatctataggca

SEQ ID NO: 2107 - DNA, 22 bp, Artificial Sequence
  Description of Artificial Sequence: Synthetic oligonucleotide
tctactacatttatctataggc

SEQ ID NO: 2108 - DNA, 22 bp, Artificial Sequence
  Description of Artificial Sequence: Synthetic oligonucleotide
attaacgtacctgtctcttccg

SEQ ID NO: 2109 - DNA, 22 bp, Artificial Sequence
  Description of Artificial Sequence: Synthetic oligonucleotide
acctgtctcttccgaaacgaat

SEQ ID NO: 2110 - DNA, 22 bp, Artificial Sequence
  Description of Artificial Sequence: Synthetic oligonucleotide
tacctgtctcttccgaaacgaa

SEQ ID NO: 2111 - DNA, 22 bp, Artificial Sequence
  Description of Artificial Sequence: Synthetic oligonucleotide
gtacctgtctcttccgaaacga

SEQ ID NO: 2112 - DNA, 22 bp, Artificial Sequence
  Description of Artificial Sequence: Synthetic oligonucleotide
cgtacctgtctcttccgaaacg

SEQ ID NO: 2113 - DNA, 22 bp, Artificial Sequence
  Description of Artificial Sequence: Synthetic oligonucleotide
acgtacctgtctcttccgaaac

SEQ ID NO: 2114 - DNA, 22 bp, Artificial Sequence
  Description of Artificial Sequence: Synthetic oligonucleotide
aacgtacctgtctcttccgaaa

SEQ ID NO: 2115 - DNA, 22 bp, Artificial Sequence
  Description of Artificial Sequence: Synthetic oligonucleotide
taacgtacctgtctcttccgaa

SEQ ID NO: 2116 - DNA, 22 bp, Artificial Sequence
  Description of Artificial Sequence: Synthetic oligonucleotide
ttaacgtacctgtctcttccga

SEQ ID NO: 2117 - DNA, 22 bp, Artificial Sequence
  Description of Artificial Sequence: Synthetic oligonucleotide
gtctcttccgaaacgaatgagt

SEQ ID NO: 2118 - DNA, 22 bp, Artificial Sequence
  Description of Artificial Sequence: Synthetic oligonucleotide
tgtctcttccgaaacgaatgag

SEQ ID NO: 2119 - DNA, 22 bp, Artificial Sequence
  Description of Artificial Sequence: Synthetic oligonucleotide
aataagaaagcgttcgtgatgt

SEQ ID NO: 2120 - DNA, 22 bp, Artificial Sequence
  Description of Artificial Sequence: Synthetic oligonucleotide
ttgtaataagaaagcgttcgtg

SEQ ID NO: 2121 - DNA, 22 bp, Artificial Sequence
  Description of Artificial Sequence: Synthetic oligonucleotide
tagcataagcagttgtggcatc

SEQ ID NO: 2122 - DNA, 22 bp, Artificial Sequence
  Description of Artificial Sequence: Synthetic oligonucleotide
ctcttagggaatctagcccatt

SEQ ID NO: 2123 - DNA, 22 bp, Artificial Sequence
  Description of Artificial Sequence: Synthetic oligonucleotide
tcttagggaatctagcccattt

SEQ ID NO: 2124 - DNA, 22 bp, Artificial Sequence
  Description of Artificial Sequence: Synthetic oligonucleotide
cactcttagggaatctagccca

SEQ ID NO: 2125 - DNA, 22 bp, Artificial Sequence
  Description of Artificial Sequence: Synthetic oligonucleotide
actcttagggaatctagcccat

SEQ ID NO: 2126 - DNA, 22 bp, Artificial Sequence
  Description of Artificial Sequence: Synthetic oligonucleotide
cttagggaatctagcccatttc

SEQ ID NO: 2127 - DNA, 22 bp, Artificial Sequence
  Description of Artificial Sequence: Synthetic oligonucleotide
ttagggaatctagcccatttca

SEQ ID NO: 2128 - DNA, 22 bp, Artificial Sequence
  Description of Artificial Sequence: Synthetic oligonucleotide
atcactcttagggaatctagcc

SEQ ID NO: 2129 - DNA, 22 bp, Artificial Sequence
  Description of Artificial Sequence: Synthetic oligonucleotide
tcactcttagggaatctagccc

SEQ ID NO: 2130 - DNA, 22 bp, Artificial Sequence
  Description of Artificial Sequence: Synthetic oligonucleotide
atctccataaacgatatgttcg

SEQ ID NO: 2131 - DNA, 22 bp, Artificial Sequence
  Description of Artificial Sequence: Synthetic oligonucleotide
tctccataaacgatatgttcga

SEQ ID NO: 2132 - DNA, 22 bp, Artificial Sequence
  Description of Artificial Sequence: Synthetic oligonucleotide
ataaacgatatgttcgaaggca

SEQ ID NO: 2133 - DNA, 22 bp, Artificial Sequence
  Description of Artificial Sequence: Synthetic oligonucleotide
taaacgatatgttcgaaggcat

SEQ ID NO: 2134 - DNA, 22 bp, Artificial Sequence
  Description of Artificial Sequence: Synthetic oligonucleotide
aaacgatatgttcgaaggcata

SEQ ID NO: 2135 - DNA, 22 bp, Artificial Sequence
  Description of Artificial Sequence: Synthetic oligonucleotide
aacgatatgttcgaaggcatag

SEQ ID NO: 2136 - DNA, 22 bp, Artificial Sequence
  Description of Artificial Sequence: Synthetic oligonucleotide
ctccataaacgatatgttcgaa

SEQ ID NO: 2137 - DNA, 22 bp, Artificial Sequence
  Description of Artificial Sequence: Synthetic oligonucleotide
tccataaacgatatgttcgaag

SEQ ID NO: 2138 - DNA, 22 bp, Artificial Sequence
  Description of Artificial Sequence: Synthetic oligonucleotide
ccataaacgatatgttcgaagg

SEQ ID NO: 2139 - DNA, 22 bp, Artificial Sequence
  Description of Artificial Sequence: Synthetic oligonucleotide
cataaacgatatgttcgaaggc

SEQ ID NO: 2140 - DNA, 22 bp, Artificial Sequence
  Description of Artificial Sequence: Synthetic oligonucleotide
caaagtcattaagatctgaatc

SEQ ID NO: 2141 - DNA, 22 bp, Artificial Sequence
  Description of Artificial Sequence: Synthetic oligonucleotide
aagtcattaagatctgaatcga

SEQ ID NO: 2142 - DNA, 22 bp, Artificial Sequence
  Description of Artificial Sequence: Synthetic oligonucleotide
agtcattaagatctgaatcgac

SEQ ID NO: 2143 - DNA, 22 bp, Artificial Sequence
  Description of Artificial Sequence: Synthetic oligonucleotide
tcaacggtaatagtaccgttgg

SEQ ID NO: 2144 - DNA, 22 bp, Artificial Sequence
  Description of Artificial Sequence: Synthetic oligonucleotide
aagtagctgagccacatcaagc

SEQ ID NO: 2145 - DNA, 22 bp, Artificial Sequence
  Description of Artificial Sequence: Synthetic oligonucleotide
gaagtagctgagccacatcaag

SEQ ID NO: 2146 - DNA, 22 bp, Artificial Sequence
  Description of Artificial Sequence: Synthetic oligonucleotide
gtagctgagccacatcaagcct

SEQ ID NO: 2147 - DNA, 22 bp, Artificial Sequence
  Description of Artificial Sequence: Synthetic oligonucleotide
agtagctgagccacatcaagcc

SEQ ID NO: 2148 - DNA, 22 bp, Artificial Sequence
  Description of Artificial Sequence: Synthetic oligonucleotide
tgtcaacacataaaccttcagt

SEQ ID NO: 2149 - DNA, 22 bp, Artificial Sequence
  Description of Artificial Sequence: Synthetic oligonucleotide
atgtcaacacataaaccttcag

SEQ ID NO: 2150 - DNA, 22 bp, Artificial Sequence
  Description of Artificial Sequence: Synthetic oligonucleotide
tatgtcaacacataaaccttca

SEQ ID NO: 2151 - DNA, 22 bp, Artificial Sequence
  Description of Artificial Sequence: Synthetic oligonucleotide
gtatgtcaacacataaaccttc

SEQ ID NO: 2152 - DNA, 22 bp, Artificial Sequence
  Description of Artificial Sequence: Synthetic oligonucleotide
ggtatgtcaacacataaacctt

SEQ ID NO: 2153 - DNA, 22 bp, Artificial Sequence
  Description of Artificial Sequence: Synthetic oligonucleotide
tcacagtgtcaacaatttcagc

SEQ ID NO: 2154 - DNA, 22 bp, Artificial Sequence
  Description of Artificial Sequence: Synthetic oligonucleotide
ctcacagtgtcaacaatttcag

SEQ ID NO: 2155 - DNA, 22 bp, Artificial Sequence
  Description of Artificial Sequence: Synthetic oligonucleotide
acagtgtcaacaatttcagcag

SEQ ID NO: 2156 - DNA, 22 bp, Artificial Sequence
  Description of Artificial Sequence: Synthetic oligonucleotide
cacagtgtcaacaatttcagca

SEQ ID NO: 2157 - DNA, 22 bp, Artificial Sequence
  Description of Artificial Sequence: Synthetic oligonucleotide
agtgtcaacaatttcagcagga

SEQ ID NO: 2158 - DNA, 22 bp, Artificial Sequence
  Description of Artificial Sequence: Synthetic oligonucleotide
cagtgtcaacaatttcagcagg

SEQ ID NO: 2159 - DNA, 22 bp, Artificial Sequence
  Description of Artificial Sequence: Synthetic oligonucleotide
tgtcaacaatttcagcaggaca

SEQ ID NO: 2160 - DNA, 22 bp, Artificial Sequence
  Description of Artificial Sequence: Synthetic oligonucleotide
gtgtcaacaatttcagcaggac

SEQ ID NO: 2161 - DNA, 22 bp, Artificial Sequence
  Description of Artificial Sequence: Synthetic oligonucleotide
catctgtgacatcacaacctgg

SEQ ID NO: 2162 - DNA, 22 bp, Artificial Sequence
  Description of Artificial Sequence: Synthetic oligonucleotide
acatctgtgacatcacaacctg

SEQ ID NO: 2163 - DNA, 22 bp, Artificial Sequence
  Description of Artificial Sequence: Synthetic oligonucleotide
gtgaattataaggtgaaataaa

SEQ ID NO: 2164 - DNA, 22 bp, Artificial Sequence
  Description of Artificial Sequence: Synthetic oligonucleotide
tgtgaattataaggtgaaataa

SEQ ID NO: 2165 - DNA, 22 bp, Artificial Sequence
  Description of Artificial Sequence: Synthetic oligonucleotide
ctgtgaattataaggtgaaata

SEQ ID NO: 2166 - DNA, 22 bp, Artificial Sequence
  Description of Artificial Sequence: Synthetic oligonucleotide
ttctgtgaattataaggtgaaa

SEQ ID NO: 2167 - DNA, 22 bp, Artificial Sequence
  Description of Artificial Sequence: Synthetic oligonucleotide
ccactacgaccgtactgaatgc

SEQ ID NO: 2168 - DNA, 22 bp, Artificial Sequence
  Description of Artificial Sequence: Synthetic oligonucleotide
accactacgaccgtactgaatg

SEQ ID NO: 2169 - DNA, 22 bp, Artificial Sequence
  Description of Artificial Sequence: Synthetic oligonucleotide
gttcgtgatgtagcaacagtga

SEQ ID NO: 2170 - DNA, 22 bp, Artificial Sequence
  Description of Artificial Sequence: Synthetic oligonucleotide
ttcgtgatgtagcaacagtgat

SEQ ID NO: 2171 - DNA, 22 bp, Artificial Sequence
  Description of Artificial Sequence: Synthetic oligonucleotide
gcctgtttatacatttgggtca

SEQ ID NO: 2172 - DNA, 22 bp, Artificial Sequence
  Description of Artificial Sequence: Synthetic oligonucleotide
tgtttatacatttgggtcatag

SEQ ID NO: 2173 - DNA, 22 bp, Artificial Sequence
  Description of Artificial Sequence: Synthetic oligonucleotide
gtttatacatttgggtcatagc

SEQ ID NO: 2174 - DNA, 22 bp, Artificial Sequence
  Description of Artificial Sequence: Synthetic oligonucleotide
cctgtttatacatttgggtcat

SEQ ID NO: 2175 - DNA, 22 bp, Artificial Sequence
  Description of Artificial Sequence: Synthetic oligonucleotide
ctgtttatacatttgggtcata

SEQ ID NO: 2176 - DNA, 22 bp, Artificial Sequence
  Description of Artificial Sequence: Synthetic oligonucleotide
gctaagttgtttaacaagcgtg

SEQ ID NO: 2177 - DNA, 22 bp, Artificial Sequence
  Description of Artificial Sequence: Synthetic oligonucleotide
ctaagttgtttaacaagcgtgt

SEQ ID NO: 2178 - DNA, 22 bp, Artificial Sequence
  Description of Artificial Sequence: Synthetic oligonucleotide
gagctaagttgtttaacaagcg

SEQ ID NO: 2179 - DNA, 22 bp, Artificial Sequence
  Description of Artificial Sequence: Synthetic oligonucleotide
gcagctactgaaaagcacgtag

SEQ ID NO: 2180 - DNA, 22 bp, Artificial Sequence
  Description of Artificial Sequence: Synthetic oligonucleotide
tgcagctactgaaaagcacgta

SEQ ID NO: 2181 - DNA, 22 bp, Artificial Sequence
  Description of Artificial Sequence: Synthetic oligonucleotide
agctactgaaaagcacgtagtg

SEQ ID NO: 2182 - DNA, 22 bp, Artificial Sequence
  Description of Artificial Sequence: Synthetic oligonucleotide
cagctactgaaaagcacgtagt

SEQ ID NO: 2183 - DNA, 22 bp, Artificial Sequence
  Description of Artificial Sequence: Synthetic oligonucleotide
ctactgaaaagcacgtagtgcg

SEQ ID NO: 2184 - DNA, 22 bp, Artificial Sequence
  Description of Artificial Sequence: Synthetic oligonucleotide
gctactgaaaagcacgtagtgc

SEQ ID NO: 2185 - DNA, 22 bp, Artificial Sequence
  Description of Artificial Sequence: Synthetic oligonucleotide
actgaaaagcacgtagtgcgtt

SEQ ID NO: 2186 - DNA, 22 bp, Artificial Sequence
  Description of Artificial Sequence: Synthetic oligonucleotide
tactgaaaagcacgtagtgcgt

SEQ ID NO: 2187 - DNA, 22 bp, Artificial Sequence
  Description of Artificial Sequence: Synthetic oligonucleotide
gtgcagctactgaaaagcacgt

SEQ ID NO: 2188 - DNA, 22 bp, Artificial Sequence
  Description of Artificial Sequence: Synthetic oligonucleotide
agtgcagctactgaaaagcacg

SEQ ID NO: 2189 - DNA, 22 bp, Artificial Sequence
  Description of Artificial Sequence: Synthetic oligonucleotide
tttgcgacattcatcattatgc

SEQ ID NO: 2190 - DNA, 22 bp, Artificial Sequence
  Description of Artificial Sequence: Synthetic oligonucleotide
attgacacagttgagtatattt

SEQ ID NO: 2191 - DNA, 22 bp, Artificial Sequence
  Description of Artificial Sequence: Synthetic oligonucleotide
tgcgacattcatcattatgcct

SEQ ID NO: 2192 - DNA, 22 bp, Artificial Sequence
  Description of Artificial Sequence: Synthetic oligonucleotide
ttgcgacattcatcattatgcc

SEQ ID NO: 2193 - DNA, 22 bp, Artificial Sequence
  Description of Artificial Sequence: Synthetic oligonucleotide
cgacattcatcattatgccttt

SEQ ID NO: 2194 - DNA, 22 bp, Artificial Sequence
  Description of Artificial Sequence: Synthetic oligonucleotide
gcgacattcatcattatgcctt

SEQ ID NO: 2195 - DNA, 22 bp, Artificial Sequence
  Description of Artificial Sequence: Synthetic oligonucleotide
tattgacacagttgagtatatt

SEQ ID NO: 2196 - DNA, 22 bp, Artificial Sequence
  Description of Artificial Sequence: Synthetic oligonucleotide
acggacgaaaccgtaagcagcc

SEQ ID NO: 2197 - DNA, 22 bp, Artificial Sequence
  Description of Artificial Sequence: Synthetic oligonucleotide
cggacgaaaccgtaagcagcct

SEQ ID NO: 2198 - DNA, 22 bp, Artificial Sequence
  Description of Artificial Sequence: Synthetic oligonucleotide
acacggacgaaaccgtaagcag

SEQ ID NO: 2199 - DNA, 22 bp, Artificial Sequence
  Description of Artificial Sequence: Synthetic oligonucleotide
cacggacgaaaccgtaagcagc

SEQ ID NO: 2200 - DNA, 22 bp, Artificial Sequence
  Description of Artificial Sequence: Synthetic oligonucleotide
caacacggacgaaaccgtaagc

SEQ ID NO: 2201 - DNA, 22 bp, Artificial Sequence
  Description of Artificial Sequence: Synthetic oligonucleotide
aacacggacgaaaccgtaagca

SEQ ID NO: 2202 - DNA, 22 bp, Artificial Sequence
  Description of Artificial Sequence: Synthetic oligonucleotide
agaagttcaaaagaaagtacta

SEQ ID NO: 2203 - DNA, 22 bp, Artificial Sequence
  Description of Artificial Sequence: Synthetic oligonucleotide
gaagttcaaaagaaagtactac

SEQ ID NO: 2204 - DNA, 22 bp, Artificial Sequence
  Description of Artificial Sequence: Synthetic oligonucleotide
aaaagaaagtactactactctg

SEQ ID NO: 2205 - DNA, 22 bp, Artificial Sequence
  Description of Artificial Sequence: Synthetic oligonucleotide
aaagaaagtactactactctgt

SEQ ID NO: 2206 - DNA, 22 bp, Artificial Sequence
  Description of Artificial Sequence: Synthetic oligonucleotide
tcaaaagaaagtactactactc

SEQ ID NO: 2207 - DNA, 22 bp, Artificial Sequence
  Description of Artificial Sequence: Synthetic oligonucleotide
caaaagaaagtactactactct

SEQ ID NO: 2208 - DNA, 22 bp, Artificial Sequence
  Description of Artificial Sequence: Synthetic oligonucleotide
gttcaaaagaaagtactactac

SEQ ID NO: 2209 - DNA, 22 bp, Artificial Sequence
  Description of Artificial Sequence: Synthetic oligonucleotide
ttcaaaagaaagtactactact

SEQ ID NO: 2210 - DNA, 22 bp, Artificial Sequence
  Description of Artificial Sequence: Synthetic oligonucleotide
aagttcaaaagaaagtactact

SEQ ID NO: 2211 - DNA, 22 bp, Artificial Sequence
  Description of Artificial Sequence: Synthetic oligonucleotide
agttcaaaagaaagtactacta

SEQ ID NO: 2212 - DNA, 22 bp, Artificial Sequence
  Description of Artificial Sequence: Synthetic oligonucleotide
aatttataattataatcagcaa

SEQ ID NO: 2213 - DNA, 22 bp, Artificial Sequence
  Description of Artificial Sequence: Synthetic oligonucleotide
tagccacattcaaagacttctt

SEQ ID NO: 2214 - DNA, 22 bp, Artificial Sequence
  Description of Artificial Sequence: Synthetic oligonucleotide
ttagccacattcaaagacttct

SEQ ID NO: 2215 - DNA, 22 bp, Artificial Sequence
  Description of Artificial Sequence: Synthetic oligonucleotide
cccatttattagctgtatgtac

SEQ ID NO: 2216 - DNA, 22 bp, Artificial Sequence
  Description of Artificial Sequence: Synthetic oligonucleotide
tcccatttattagctgtatgta

SEQ ID NO: 2217 - DNA, 22 bp, Artificial Sequence
  Description of Artificial Sequence: Synthetic oligonucleotide
tgtctattggtcatagtactac

SEQ ID NO: 2218 - DNA, 22 bp, Artificial Sequence
  Description of Artificial Sequence: Synthetic oligonucleotide
ctgtctattggtcatagtacta

SEQ ID NO: 2219 - DNA, 22 bp, Artificial Sequence
  Description of Artificial Sequence: Synthetic oligonucleotide
tctattggtcatagtactacag

SEQ ID NO: 2220 - DNA, 22 bp, Artificial Sequence
  Description of Artificial Sequence: Synthetic oligonucleotide
gtctattggtcatagtactaca

SEQ ID NO: 2221 - DNA, 22 bp, Artificial Sequence
  Description of Artificial Sequence: Synthetic oligonucleotide
tattggtcatagtactacagat

SEQ ID NO: 2222 - DNA, 22 bp, Artificial Sequence
  Description of Artificial Sequence: Synthetic oligonucleotide
ctattggtcatagtactacaga

SEQ ID NO: 2223 - DNA, 22 bp, Artificial Sequence
  Description of Artificial Sequence: Synthetic oligonucleotide
ttggtcatagtactacagatag

SEQ ID NO: 2224 - DNA, 22 bp, Artificial Sequence
  Description of Artificial Sequence: Synthetic oligonucleotide
attggtcatagtactacagata

SEQ ID NO: 2225 - DNA, 22 bp, Artificial Sequence
  Description of Artificial Sequence: Synthetic oligonucleotide
ggtcatagtactacagatagag

SEQ ID NO: 2226 - DNA, 22 bp, Artificial Sequence
  Description of Artificial Sequence: Synthetic oligonucleotide
tggtcatagtactacagataga

SEQ ID NO: 2227 - DNA, 22 bp, Artificial Sequence
  Description of Artificial Sequence: Synthetic oligonucleotide
aacccacagggtcattagcaca

SEQ ID NO: 2228 - DNA, 22 bp, Artificial Sequence
  Description of Artificial Sequence: Synthetic oligonucleotide
aaacccacagggtcattagcac

SEQ ID NO: 2229 - DNA, 22 bp, Artificial Sequence
  Description of Artificial Sequence: Synthetic oligonucleotide
aaaacccacagggtcattagca

SEQ ID NO: 2230 - DNA, 22 bp, Artificial Sequence
  Description of Artificial Sequence: Synthetic oligonucleotide
taaaacccacagggtcattagc

SEQ ID NO: 2231 - DNA, 22 bp, Artificial Sequence
  Description of Artificial Sequence: Synthetic oligonucleotide
ccacagggtcattagcacaagt

SEQ ID NO: 2232 - DNA, 22 bp, Artificial Sequence
  Description of Artificial Sequence: Synthetic oligonucleotide
cccacagggtcattagcacaag

SEQ ID NO: 2233 - DNA, 22 bp, Artificial Sequence
  Description of Artificial Sequence: Synthetic oligonucleotide
acccacagggtcattagcacaa

SEQ ID NO: 2234 - DNA, 22 bp, Artificial Sequence
  Description of Artificial Sequence: Synthetic oligonucleotide
gtaaaacccacagggtcattag

SEQ ID NO: 2235 - DNA, 22 bp, Artificial Sequence
  Description of Artificial Sequence: Synthetic oligonucleotide
tgtaaaacccacagggtcatta

SEQ ID NO: 2236 - DNA, 22 bp, Artificial Sequence
  Description of Artificial Sequence: Synthetic oligonucleotide
tagtcgtcgtcggttcatcata

SEQ ID NO: 2237 - DNA, 22 bp, Artificial Sequence
  Description of Artificial Sequence: Synthetic oligonucleotide
agtcgtcgtcggttcatcataa

SEQ ID NO: 2238 - DNA, 22 bp, Artificial Sequence
  Description of Artificial Sequence: Synthetic oligonucleotide
tcgtcggttcatcataaattgg

SEQ ID NO: 2239 - DNA, 22 bp, Artificial Sequence
  Description of Artificial Sequence: Synthetic oligonucleotide
gtcgtcgtcggttcatcataaa

SEQ ID NO: 2240 - DNA, 22 bp, Artificial Sequence
  Description of Artificial Sequence: Synthetic oligonucleotide
tcgtcgtcggttcatcataaat

SEQ ID NO: 2241 - DNA, 22 bp, Artificial Sequence
  Description of Artificial Sequence: Synthetic oligonucleotide
cgtcgtcggttcatcataaatt

SEQ ID NO: 2242 - DNA, 22 bp, Artificial Sequence
  Description of Artificial Sequence: Synthetic oligonucleotide
gtcgtcggttcatcataaattg

SEQ ID NO: 2243 - DNA, 22 bp, Artificial Sequence
  Description of Artificial Sequence: Synthetic oligonucleotide
gtagactatatatcgtaaacgg

SEQ ID NO: 2244 - DNA, 22 bp, Artificial Sequence
  Description of Artificial Sequence: Synthetic oligonucleotide
agtagactatatatcgtaaacg

SEQ ID NO: 2245 - DNA, 22 bp, Artificial Sequence
  Description of Artificial Sequence: Synthetic oligonucleotide
agactatatatcgtaaacggaa

SEQ ID NO: 2246 - DNA, 22 bp, Artificial Sequence
  Description of Artificial Sequence: Synthetic oligonucleotide
tagactatatatcgtaaacgga

SEQ ID NO: 2247 - DNA, 22 bp, Artificial Sequence
  Description of Artificial Sequence: Synthetic oligonucleotide
gggcaaattgtgcaatttgcgg

SEQ ID NO: 2248 - DNA, 22 bp, Artificial Sequence
  Description of Artificial Sequence: Synthetic oligonucleotide
ggggcaaattgtgcaatttgcg

SEQ ID NO: 2249 - DNA, 22 bp, Artificial Sequence
  Description of Artificial Sequence: Synthetic oligonucleotide
cacataccgcagacggtacaga

SEQ ID NO: 2250 - DNA, 22 bp, Artificial Sequence
  Description of Artificial Sequence: Synthetic oligonucleotide
acataccgcagacggtacagac

SEQ ID NO: 2251 - DNA, 22 bp, Artificial Sequence
  Description of Artificial Sequence: Synthetic oligonucleotide
taccgcagacggtacagactgt

SEQ ID NO: 2252 - DNA, 22 bp, Artificial Sequence
  Description of Artificial Sequence: Synthetic oligonucleotide
cattaacaatagttgtacattc

SEQ ID NO: 2253 - DNA, 22 bp, Artificial Sequence
  Description of Artificial Sequence: Synthetic oligonucleotide
ccattaacaatagttgtacatt

SEQ ID NO: 2254 - DNA, 22 bp, Artificial Sequence
  Description of Artificial Sequence: Synthetic oligonucleotide
ggtttaaatcatcagcaaattt

SEQ ID NO: 2255 - DNA, 22 bp, Artificial Sequence
  Description of Artificial Sequence: Synthetic oligonucleotide
tggtttaaatcatcagcaaatt

SEQ ID NO: 2256 - DNA, 22 bp, Artificial Sequence
  Description of Artificial Sequence: Synthetic oligonucleotide
ctctgagtaaagtaagtttcag

SEQ ID NO: 2257 - DNA, 22 bp, Artificial Sequence
  Description of Artificial Sequence: Synthetic oligonucleotide
tctgagtaaagtaagtttcagg

SEQ ID NO: 2258 - DNA, 22 bp, Artificial Sequence
  Description of Artificial Sequence: Synthetic oligonucleotide
tttattgaaataatcatcatca

SEQ ID NO: 2259 - DNA, 22 bp, Artificial Sequence
  Description of Artificial Sequence: Synthetic oligonucleotide
ttattgaaataatcatcatcac

SEQ ID NO: 2260 - DNA, 22 bp, Artificial Sequence
  Description of Artificial Sequence: Synthetic oligonucleotide
cacattgttggtagattataac

SEQ ID NO: 2261 - DNA, 22 bp, Artificial Sequence
  Description of Artificial Sequence: Synthetic oligonucleotide
acattgttggtagattataacg

SEQ ID NO: 2262 - DNA, 22 bp, Artificial Sequence
  Description of Artificial Sequence: Synthetic oligonucleotide
ttgttggtagattataacgata

SEQ ID NO: 2263 - DNA, 22 bp, Artificial Sequence
  Description of Artificial Sequence: Synthetic oligonucleotide
cattgttggtagattataacga

SEQ ID NO: 2264 - DNA, 22 bp, Artificial Sequence
  Description of Artificial Sequence: Synthetic oligonucleotide
attgttggtagattataacgat

SEQ ID NO: 2265 - DNA, 22 bp, Artificial Sequence
  Description of Artificial Sequence: Synthetic oligonucleotide
acggtgcgagctctattctttg

SEQ ID NO: 2266 - DNA, 22 bp, Artificial Sequence
  Description of Artificial Sequence: Synthetic oligonucleotide
cggtgcgagctctattctttgc

SEQ ID NO: 2267 - DNA, 22 bp, Artificial Sequence
  Description of Artificial Sequence: Synthetic oligonucleotide
agctctattctttgcactaatg

SEQ ID NO: 2268 - DNA, 22 bp, Artificial Sequence
  Description of Artificial Sequence: Synthetic oligonucleotide
gctctattctttgcactaatgg

SEQ ID NO: 2269 - DNA, 22 bp, Artificial Sequence
  Description of Artificial Sequence: Synthetic oligonucleotide
cgagctctattctttgcactaa

SEQ ID NO: 2270 - DNA, 22 bp, Artificial Sequence
  Description of Artificial Sequence: Synthetic oligonucleotide
gagctctattctttgcactaat

SEQ ID NO: 2271 - DNA, 22 bp, Artificial Sequence
  Description of Artificial Sequence: Synthetic oligonucleotide
tgcgagctctattctttgcact

SEQ ID NO: 2272 - DNA, 22 bp, Artificial Sequence
  Description of Artificial Sequence: Synthetic oligonucleotide
gcgagctctattctttgcacta

SEQ ID NO: 2273 - DNA, 22 bp, Artificial Sequence
  Description of Artificial Sequence: Synthetic oligonucleotide
ggtgcgagctctattctttgca

SEQ ID NO: 2274 - DNA, 22 bp, Artificial Sequence
  Description of Artificial Sequence: Synthetic oligonucleotide
gtgcgagctctattctttgcac

SEQ ID NO: 2275 - DNA, 22 bp, Artificial Sequence
  Description of Artificial Sequence: Synthetic oligonucleotide
aaacatacggattaacagacaa

SEQ ID NO: 2276 - DNA, 22 bp, Artificial Sequence
  Description of Artificial Sequence: Synthetic oligonucleotide
caaacatacggattaacagaca

SEQ ID NO: 2277 - DNA, 22 bp, Artificial Sequence
  Description of Artificial Sequence: Synthetic oligonucleotide
ggattaacagacaagactaatt

SEQ ID NO: 2278 - DNA, 22 bp, Artificial Sequence
  Description of Artificial Sequence: Synthetic oligonucleotide
gcacacaatggaaaactaatgg

SEQ ID NO: 2279 - DNA, 22 bp, Artificial Sequence
  Description of Artificial Sequence: Synthetic oligonucleotide
agcacacaatggaaaactaatg

SEQ ID NO: 2280 - DNA, 22 bp, Artificial Sequence
  Description of Artificial Sequence: Synthetic oligonucleotide
tagcacacaatggaaaactaat

SEQ ID NO: 2281 - DNA, 22 bp, Artificial Sequence
  Description of Artificial Sequence: Synthetic oligonucleotide
ttagcacacaatggaaaactaa

SEQ ID NO: 2282 - DNA, 22 bp, Artificial Sequence
  Description of Artificial Sequence: Synthetic oligonucleotide
cacacaatggaaaactaatggg

SEQ ID NO: 2283 - DNA, 22 bp, Artificial Sequence
  Description of Artificial Sequence: Synthetic oligonucleotide
tggtctgtgtttaatttatagt

SEQ ID NO: 2284 - DNA, 22 bp, Artificial Sequence
  Description of Artificial Sequence: Synthetic oligonucleotide
attagcacacaatggaaaacta

SEQ ID NO: 2285 - DNA, 22 bp, Artificial Sequence
  Description of Artificial Sequence: Synthetic oligonucleotide
cattagcacacaatggaaaact

SEQ ID NO: 2286 - DNA, 22 bp, Artificial Sequence
  Description of Artificial Sequence: Synthetic oligonucleotide
ttctggttctagtgtgccctta

SEQ ID NO: 2287 - DNA, 22 bp, Artificial Sequence
  Description of Artificial Sequence: Synthetic oligonucleotide
attctggttctagtgtgccctt

SEQ ID NO: 2288 - DNA, 22 bp, Artificial Sequence
  Description of Artificial Sequence: Synthetic oligonucleotide
ctggttctagtgtgcccttagt

SEQ ID NO: 2289 - DNA, 22 bp, Artificial Sequence
  Description of Artificial Sequence: Synthetic oligonucleotide
actagtggtccaaaacttgtag

SEQ ID NO: 2290 - DNA, 22 bp, Artificial Sequence
  Description of Artificial Sequence: Synthetic oligonucleotide
cactagtggtccaaaacttgta

SEQ ID NO: 2291 - DNA, 22 bp, Artificial Sequence
  Description of Artificial Sequence: Synthetic oligonucleotide
tagtggtccaaaacttgtaggt

SEQ ID NO: 2292 - DNA, 22 bp, Artificial Sequence
  Description of Artificial Sequence: Synthetic oligonucleotide
ctagtggtccaaaacttgtagg

SEQ ID NO: 2293 - DNA, 22 bp, Artificial Sequence
  Description of Artificial Sequence: Synthetic oligonucleotide
agtggtccaaaacttgtaggtg

SEQ ID NO: 2294 - DNA, 22 bp, Artificial Sequence
  Description of Artificial Sequence: Synthetic oligonucleotide
ggtccaaaacttgtaggtggga

SEQ ID NO: 2295 - DNA, 22 bp, Artificial Sequence
  Description of Artificial Sequence: Synthetic oligonucleotide
tggtccaaaacttgtaggtggg

SEQ ID NO: 2296 - DNA, 22 bp, Artificial Sequence
  Description of Artificial Sequence: Synthetic oligonucleotide
tcactagtggtccaaaacttgt

SEQ ID NO: 2297 - DNA, 22 bp, Artificial Sequence
  Description of Artificial Sequence: Synthetic oligonucleotide
ctcactagtggtccaaaacttg

SEQ ID NO: 2298 - DNA, 22 bp, Artificial Sequence
  Description of Artificial Sequence: Synthetic oligonucleotide
atcagtactagtgcctgtgccg

SEQ ID NO: 2299 - DNA, 22 bp, Artificial Sequence
  Description of Artificial Sequence: Synthetic oligonucleotide
aaaccaaagcactcacagtgtc

SEQ ID NO: 2300 - DNA, 22 bp, Artificial Sequence
  Description of Artificial Sequence: Synthetic oligonucleotide
tttagaccagaagatcaggaac

SEQ ID NO: 2301 - DNA, 22 bp, Artificial Sequence
  Description of Artificial Sequence: Synthetic oligonucleotide
gtttagaccagaagatcaggaa

SEQ ID NO: 2302 - DNA, 22 bp, Artificial Sequence
  Description of Artificial Sequence: Synthetic oligonucleotide
gctgcctggagttgaatttctt

SEQ ID NO: 2303 - DNA, 22 bp, Artificial Sequence
  Description of Artificial Sequence: Synthetic oligonucleotide
gtgacagcttgacaaatgttaa

SEQ ID NO: 2304 - DNA, 22 bp, Artificial Sequence
  Description of Artificial Sequence: Synthetic oligonucleotide
gtttgagcagaaagaggtccta

SEQ ID NO: 2305 - DNA, 22 bp, Artificial Sequence
  Description of Artificial Sequence: Synthetic oligonucleotide
ataataagcataattaaaacaa

SEQ ID NO: 2306 - DNA, 22 bp, Artificial Sequence
  Description of Artificial Sequence: Synthetic oligonucleotide
taataagcataattaaaacaag

SEQ ID NO: 2307 - DNA, 22 bp, Artificial Sequence
  Description of Artificial Sequence: Synthetic oligonucleotide
aataagcataattaaaacaagg

SEQ ID NO: 2308 - DNA, 22 bp, Artificial Sequence
  Description of Artificial Sequence: Synthetic oligonucleotide
gattaggatgtttagtaagtgg

SEQ ID NO: 2309 - DNA, 22 bp, Artificial Sequence
  Description of Artificial Sequence: Synthetic oligonucleotide
attaggatgtttagtaagtggg

SEQ ID NO: 2310 - DNA, 22 bp, Artificial Sequence
  Description of Artificial Sequence: Synthetic oligonucleotide
ttaggatgtttagtaagtgggt

SEQ ID NO: 2311 - DNA, 22 bp, Artificial Sequence
  Description of Artificial Sequence: Synthetic oligonucleotide
taggatgtttagtaagtgggta

SEQ ID NO: 2312 - DNA, 22 bp, Artificial Sequence
  Description of Artificial Sequence: Synthetic oligonucleotide
ggatgtttagtaagtgggtaag

SEQ ID NO: 2313 - DNA, 22 bp, Artificial Sequence
  Description of Artificial Sequence: Synthetic oligonucleotide
gatgtttagtaagtgggtaagc

SEQ ID NO: 2314 - DNA, 22 bp, Artificial Sequence
  Description of Artificial Sequence: Synthetic oligonucleotide
atgtttagtaagtgggtaagca

SEQ ID NO: 2315 - DNA, 22 bp, Artificial Sequence
  Description of Artificial Sequence: Synthetic oligonucleotide
ctgattaggatgtttagtaagt

SEQ ID NO: 2316 - DNA, 22 bp, Artificial Sequence
  Description of Artificial Sequence: Synthetic oligonucleotide
tgattaggatgtttagtaagtg

SEQ ID NO: 2317 - DNA, 22 bp, Artificial Sequence
  Description of Artificial Sequence: Synthetic oligonucleotide
tttgcaacattgctagaaaact

SEQ ID NO: 2318 - DNA, 22 bp, Artificial Sequence
  Description of Artificial Sequence: Synthetic oligonucleotide
aatttgcaacattgctagaaaa

SEQ ID NO: 2319 - DNA, 22 bp, Artificial Sequence
  Description of Artificial Sequence: Synthetic oligonucleotide
atttgcaacattgctagaaaac

SEQ ID NO: 2320 - DNA, 22 bp, Artificial Sequence
  Description of Artificial Sequence: Synthetic oligonucleotide
ataatttgcaacattgctagaa

SEQ ID NO: 2321 - DNA, 22 bp, Artificial Sequence
  Description of Artificial Sequence: Synthetic oligonucleotide
tgataatttgcaacattgctag

SEQ ID NO: 2322 - DNA, 22 bp, Artificial Sequence
  Description of Artificial Sequence: Synthetic oligonucleotide
gataatttgcaacattgctaga

SEQ ID NO: 2323 - DNA, 22 bp, Artificial Sequence
  Description of Artificial Sequence: Synthetic oligonucleotide
tttgataatttgcaacattgct

SEQ ID NO: 2324 - DNA, 22 bp, Artificial Sequence
  Description of Artificial Sequence: Synthetic oligonucleotide
ttgataatttgcaacattgcta

SEQ ID NO: 2325 - DNA, 22 bp, Artificial Sequence
  Description of Artificial Sequence: Synthetic oligonucleotide
cttaccagtaccaggtggtccc

SEQ ID NO: 2326 - DNA, 22 bp, Artificial Sequence
  Description of Artificial Sequence: Synthetic oligonucleotide
cagtaccaggtggtccctggag

SEQ ID NO: 2327 - DNA, 22 bp, Artificial Sequence
  Description of Artificial Sequence: Synthetic oligonucleotide
agtaccaggtggtccctggagt

SEQ ID NO: 2328 - DNA, 22 bp, Artificial Sequence
  Description of Artificial Sequence: Synthetic oligonucleotide
aactcattgaatcataataaag

SEQ ID NO: 2329 - DNA, 22 bp, Artificial Sequence
  Description of Artificial Sequence: Synthetic oligonucleotide
actcattgaatcataataaagt

SEQ ID NO: 2330 - DNA, 22 bp, Artificial Sequence
  Description of Artificial Sequence: Synthetic oligonucleotide
gaatcataataaagtctagcct

SEQ ID NO: 2331 - DNA, 22 bp, Artificial Sequence
  Description of Artificial Sequence: Synthetic oligonucleotide
aatcataataaagtctagcctt

SEQ ID NO: 2332 - DNA, 22 bp, Artificial Sequence
  Description of Artificial Sequence: Synthetic oligonucleotide
ttgaatcataataaagtctagc

SEQ ID NO: 2333 - DNA, 22 bp, Artificial Sequence
  Description of Artificial Sequence: Synthetic oligonucleotide
tgaatcataataaagtctagcc

SEQ ID NO: 2334 - DNA, 22 bp, Artificial Sequence
  Description of Artificial Sequence: Synthetic oligonucleotide
cattgaatcataataaagtcta

SEQ ID NO: 2335 - DNA, 22 bp, Artificial Sequence
  Description of Artificial Sequence: Synthetic oligonucleotide
attgaatcataataaagtctag

SEQ ID NO: 2336 - DNA, 22 bp, Artificial Sequence
  Description of Artificial Sequence: Synthetic oligonucleotide
ctcattgaatcataataaagtc

SEQ ID NO: 2337 - DNA, 22 bp, Artificial Sequence
  Description of Artificial Sequence: Synthetic oligonucleotide
tcattgaatcataataaagtct

SEQ ID NO: 2338 - DNA, 22 bp, Artificial Sequence
  Description of Artificial Sequence: Synthetic oligonucleotide
ggtgcaactcctttatcagaac

SEQ ID NO: 2339 - DNA, 22 bp, Artificial Sequence
  Description of Artificial Sequence: Synthetic oligonucleotide
gtgcaactcctttatcagaacc

SEQ ID NO: 2340 - DNA, 22 bp, Artificial Sequence
  Description of Artificial Sequence: Synthetic oligonucleotide
tcctttatcagaaccagcacca

SEQ ID NO: 2341 - DNA, 22 bp, Artificial Sequence
  Description of Artificial Sequence: Synthetic oligonucleotide
actcctttatcagaaccagcac

SEQ ID NO: 2342 - DNA, 22 bp, Artificial Sequence
  Description of Artificial Sequence: Synthetic oligonucleotide
ctcctttatcagaaccagcacc

SEQ ID NO: 2343 - DNA, 22 bp, Artificial Sequence
  Description of Artificial Sequence: Synthetic oligonucleotide
caactcctttatcagaaccagc

SEQ ID NO: 2344 - DNA, 22 bp, Artificial Sequence
  Description of Artificial Sequence: Synthetic oligonucleotide
aactcctttatcagaaccagca

SEQ ID NO: 2345 - DNA, 22 bp, Artificial Sequence
  Description of Artificial Sequence: Synthetic oligonucleotide
tgcaactcctttatcagaacca

SEQ ID NO: 2346 - DNA, 22 bp, Artificial Sequence
  Description of Artificial Sequence: Synthetic oligonucleotide
gcaactcctttatcagaaccag

SEQ ID NO: 2347 - DNA, 22 bp, Artificial Sequence
  Description of Artificial Sequence: Synthetic oligonucleotide
ttaggcatggctctatcacatt

SEQ ID NO: 2348 - DNA, 22 bp, Artificial Sequence
  Description of Artificial Sequence: Synthetic oligonucleotide
gtttaactagcattgtatgttg

SEQ ID NO: 2349 - DNA, 22 bp, Artificial Sequence
  Description of Artificial Sequence: Synthetic oligonucleotide
tgtttaactagcattgtatgtt

SEQ ID NO: 2350 - DNA, 22 bp, Artificial Sequence
  Description of Artificial Sequence: Synthetic oligonucleotide
tcaaaagttgttaccactctaa

SEQ ID NO: 2351 - DNA, 22 bp, Artificial Sequence
  Description of Artificial Sequence: Synthetic oligonucleotide
atcaaaagttgttaccactcta

SEQ ID NO: 2352 - DNA, 22 bp, Artificial Sequence
  Description of Artificial Sequence: Synthetic oligonucleotide
aaaagttgttaccactctaaca

SEQ ID NO: 2353 - DNA, 22 bp, Artificial Sequence
  Description of Artificial Sequence: Synthetic oligonucleotide
caaaagttgttaccactctaac

SEQ ID NO: 2354 - DNA, 22 bp, Artificial Sequence
  Description of Artificial Sequence: Synthetic oligonucleotide
aagttgttaccactctaacaga

SEQ ID NO: 2355 - DNA, 22 bp, Artificial Sequence
  Description of Artificial Sequence: Synthetic oligonucleotide
aaagttgttaccactctaacag

SEQ ID NO: 2356 - DNA, 22 bp, Artificial Sequence
  Description of Artificial Sequence: Synthetic oligonucleotide
gttgttaccactctaacagaac

SEQ ID NO: 2357 - DNA, 22 bp, Artificial Sequence
  Description of Artificial Sequence: Synthetic oligonucleotide
agttgttaccactctaacagaa

SEQ ID NO: 2358 - DNA, 22 bp, Artificial Sequence
  Description of Artificial Sequence: Synthetic oligonucleotide
tagcaggcatatagaccatatt

SEQ ID NO: 2359 - DNA, 22 bp, Artificial Sequence
  Description of Artificial Sequence: Synthetic oligonucleotide
ttcagaatcaccattagcaaca

SEQ ID NO: 2360 - DNA, 22 bp, Artificial Sequence
  Description of Artificial Sequence: Synthetic oligonucleotide
cttcagaatcaccattagcaac

SEQ ID NO: 2361 - DNA, 22 bp, Artificial Sequence
  Description of Artificial Sequence: Synthetic oligonucleotide
atcaccattagcaacagcctgc

SEQ ID NO: 2362 - DNA, 22 bp, Artificial Sequence
  Description of Artificial Sequence: Synthetic oligonucleotide
aatcaccattagcaacagcctg

SEQ ID NO: 2363 - DNA, 22 bp, Artificial Sequence
  Description of Artificial Sequence: Synthetic oligonucleotide
caccattagcaacagcctgctc

SEQ ID NO: 2364 - DNA, 22 bp, Artificial Sequence
  Description of Artificial Sequence: Synthetic oligonucleotide
tcaccattagcaacagcctgct

SEQ ID NO: 2365 - DNA, 22 bp, Artificial Sequence
  Description of Artificial Sequence: Synthetic oligonucleotide
cagaatcaccattagcaacagc

SEQ ID NO: 2366 - DNA, 22 bp, Artificial Sequence
  Description of Artificial Sequence: Synthetic oligonucleotide
tcagaatcaccattagcaacag

SEQ ID NO: 2367 - DNA, 22 bp, Artificial Sequence
  Description of Artificial Sequence: Synthetic oligonucleotide
gaatcaccattagcaacagcct

SEQ ID NO: 2368 - DNA, 22 bp, Artificial Sequence
  Description of Artificial Sequence: Synthetic oligonucleotide
agaatcaccattagcaacagcc

SEQ ID NO: 2369 - DNA, 22 bp, Artificial Sequence
  Description of Artificial Sequence: Synthetic oligonucleotide
ataactcattgaatcataataa

SEQ ID NO: 2370 - DNA, 22 bp, Artificial Sequence
  Description of Artificial Sequence: Synthetic oligonucleotide
taactcattgaatcataataaa

SEQ ID NO: 2371 - DNA, 22 bp, Artificial Sequence
  Description of Artificial Sequence: Synthetic oligonucleotide
tcataactcattgaatcataat

SEQ ID NO: 2372 - DNA, 22 bp, Artificial Sequence
  Description of Artificial Sequence: Synthetic oligonucleotide
cataactcattgaatcataata

SEQ ID NO: 2373 - DNA, 22 bp, Artificial Sequence
  Description of Artificial Sequence: Synthetic oligonucleotide
cctcataactcattgaatcata

SEQ ID NO: 2374 - DNA, 22 bp, Artificial Sequence
  Description of Artificial Sequence: Synthetic oligonucleotide
ctcataactcattgaatcataa

SEQ ID NO: 2375 - DNA, 22 bp, Artificial Sequence
  Description of Artificial Sequence: Synthetic oligonucleotide
atcctcataactcattgaatca

SEQ ID NO: 2376 - DNA, 22 bp, Artificial Sequence
  Description of Artificial Sequence: Synthetic oligonucleotide
tcctcataactcattgaatcat

SEQ ID NO: 2377 - DNA, 22 bp, Artificial Sequence
  Description of Artificial Sequence: Synthetic oligonucleotide
tgatcctcataactcattgaat

SEQ ID NO: 2378 - DNA, 22 bp, Artificial Sequence
  Description of Artificial Sequence: Synthetic oligonucleotide
gatcctcataactcattgaatc

SEQ ID NO: 2379 - DNA, 22 bp, Artificial Sequence
  Description of Artificial Sequence: Synthetic oligonucleotide
ttgttgataatgttgttgagtg

SEQ ID NO: 2380 - DNA, 22 bp, Artificial Sequence
  Description of Artificial Sequence: Synthetic oligonucleotide
gcattgttgataatgttgttga

SEQ ID NO: 2381 - DNA, 22 bp, Artificial Sequence
  Description of Artificial Sequence: Synthetic oligonucleotide
cattgttgataatgttgttgag

SEQ ID NO: 2382 - DNA, 22 bp, Artificial Sequence
  Description of Artificial Sequence: Synthetic oligonucleotide
cccatcatagagatgagtcttc

SEQ ID NO: 2383 - DNA, 22 bp, Artificial Sequence
  Description of Artificial Sequence: Synthetic oligonucleotide
aacccatcatagagatgagtct

SEQ ID NO: 2384 - DNA, 22 bp, Artificial Sequence
  Description of Artificial Sequence: Synthetic oligonucleotide
acccatcatagagatgagtctt

SEQ ID NO: 2385 - DNA, 22 bp, Artificial Sequence
  Description of Artificial Sequence: Synthetic oligonucleotide
ccacgttcccgaaggtgtgact

SEQ ID NO: 2386 - DNA, 22 bp, Artificial Sequence
  Description of Artificial Sequence: Synthetic oligonucleotide
cacgttcccgaaggtgtgactt

SEQ ID NO: 2387 - DNA, 22 bp, Artificial Sequence
  Description of Artificial Sequence: Synthetic oligonucleotide
gttcccgaaggtgtgacttcca

SEQ ID NO: 2388 - DNA, 22 bp, Artificial Sequence
  Description of Artificial Sequence: Synthetic oligonucleotide
acgttcccgaaggtgtgacttc

SEQ ID NO: 2389 - DNA, 22 bp, Artificial Sequence
  Description of Artificial Sequence: Synthetic oligonucleotide
cgttcccgaaggtgtgacttcc

SEQ ID NO: 2390 - DNA, 22 bp, Artificial Sequence
  Description of Artificial Sequence: Synthetic oligonucleotide
ctcaagctggttcaatctgtca

SEQ ID NO: 2391 - DNA, 22 bp, Artificial Sequence
  Description of Artificial Sequence: Synthetic oligonucleotide
tcaagctggttcaatctgtcaa

SEQ ID NO: 2392 - DNA, 22 bp, Artificial Sequence
  Description of Artificial Sequence: Synthetic oligonucleotide
ctggttcaatctgtcaagcagc

SEQ ID NO: 2393 - DNA, 22 bp, Artificial Sequence
  Description of Artificial Sequence: Synthetic oligonucleotide
tggttcaatctgtcaagcagca

SEQ ID NO: 2394 - DNA, 22 bp, Artificial Sequence
  Description of Artificial Sequence: Synthetic oligonucleotide
agctggttcaatctgtcaagca

SEQ ID NO: 2395 - DNA, 22 bp, Artificial Sequence
  Description of Artificial Sequence: Synthetic oligonucleotide
gctggttcaatctgtcaagcag

SEQ ID NO: 2396 - DNA, 22 bp, Artificial Sequence
  Description of Artificial Sequence: Synthetic oligonucleotide
caagctggttcaatctgtcaag

SEQ ID NO: 2397 - DNA, 22 bp, Artificial Sequence
  Description of Artificial Sequence: Synthetic oligonucleotide
aagctggttcaatctgtcaagc

SEQ ID NO: 2398 - DNA, 22 bp, Artificial Sequence
  Description of Artificial Sequence: Synthetic oligonucleotide
taacaacatcaaaaggtgtaaa

SEQ ID NO: 2399 - DNA, 22 bp, Artificial Sequence
  Description of Artificial Sequence: Synthetic oligonucleotide
agacgggctgcacttacaccgc

SEQ ID NO: 2400 - DNA, 22 bp, Artificial Sequence
  Description of Artificial Sequence: Synthetic oligonucleotide
aagacgggctgcacttacaccg

SEQ ID NO: 2401 - DNA, 22 bp, Artificial Sequence
  Description of Artificial Sequence: Synthetic oligonucleotide
gggctgcacttacaccgcaaac

SEQ ID NO: 2402 - DNA, 22 bp, Artificial Sequence
  Description of Artificial Sequence: Synthetic oligonucleotide
cgggctgcacttacaccgcaaa

SEQ ID NO: 2403 - DNA, 22 bp, Artificial Sequence
  Description of Artificial Sequence: Synthetic oligonucleotide
acgggctgcacttacaccgcaa

SEQ ID NO: 2404 - DNA, 22 bp, Artificial Sequence
  Description of Artificial Sequence: Synthetic oligonucleotide
gacgggctgcacttacaccgca

SEQ ID NO: 2405 - DNA, 22 bp, Artificial Sequence
  Description of Artificial Sequence: Synthetic oligonucleotide
tgcacttacaccgcaaacccgt

SEQ ID NO: 2406 - DNA, 22 bp, Artificial Sequence
  Description of Artificial Sequence: Synthetic oligonucleotide
ctgcacttacaccgcaaacccg

SEQ ID NO: 2407 - DNA, 22 bp, Artificial Sequence
  Description of Artificial Sequence: Synthetic oligonucleotide
gctgcacttacaccgcaaaccc

SEQ ID NO: 2408 - DNA, 22 bp, Artificial Sequence
  Description of Artificial Sequence: Synthetic oligonucleotide
ggctgcacttacaccgcaaacc

SEQ ID NO: 2409 - DNA, 22 bp, Artificial Sequence
  Description of Artificial Sequence: Synthetic oligonucleotide
agatcttgattatctaatgtca

SEQ ID NO: 2410 - DNA, 22 bp, Artificial Sequence
  Description of Artificial Sequence: Synthetic oligonucleotide
tgaaacatctgttgtcacttac

SEQ ID NO: 2411 - DNA, 22 bp, Artificial Sequence
  Description of Artificial Sequence: Synthetic oligonucleotide
atgaaacatctgttgtcactta

SEQ ID NO: 2412 - DNA, 22 bp, Artificial Sequence
  Description of Artificial Sequence: Synthetic oligonucleotide
aaacatctgttgtcacttactg

SEQ ID NO: 2413 - DNA, 22 bp, Artificial Sequence
  Description of Artificial Sequence: Synthetic oligonucleotide
gaaacatctgttgtcacttact

SEQ ID NO: 2414 - DNA, 22 bp, Artificial Sequence
  Description of Artificial Sequence: Synthetic oligonucleotide
gagatgaaacatctgttgtcac

SEQ ID NO: 2415 - DNA, 22 bp, Artificial Sequence
  Description of Artificial Sequence: Synthetic oligonucleotide
cgagatgaaacatctgttgtca

SEQ ID NO: 2416 - DNA, 22 bp, Artificial Sequence
  Description of Artificial Sequence: Synthetic oligonucleotide
gatgaaacatctgttgtcactt

SEQ ID NO: 2417 - DNA, 22 bp, Artificial Sequence
  Description of Artificial Sequence: Synthetic oligonucleotide
agatgaaacatctgttgtcact

SEQ ID NO: 2418 - DNA, 22 bp, Artificial Sequence
  Description of Artificial Sequence: Synthetic oligonucleotide
acgagatgaaacatctgttgtc

SEQ ID NO: 2419 - DNA, 22 bp, Artificial Sequence
  Description of Artificial Sequence: Synthetic oligonucleotide
aacgagatgaaacatctgttgt

SEQ ID NO: 2420 - DNA, 22 bp, Artificial Sequence
  Description of Artificial Sequence: Synthetic oligonucleotide
ggtaattgagcagggtcgccaa

SEQ ID NO: 2421 - DNA, 22 bp, Artificial Sequence
  Description of Artificial Sequence: Synthetic oligonucleotide
gtaattgagcagggtcgccaat

SEQ ID NO: 2422 - DNA, 22 bp, Artificial Sequence
  Description of Artificial Sequence: Synthetic oligonucleotide
agagctatgtaagtttacatcc

SEQ ID NO: 2423 - DNA, 22 bp, Artificial Sequence
  Description of Artificial Sequence: Synthetic oligonucleotide
gagctatgtaagtttacatcct

SEQ ID NO: 2424 - DNA, 22 bp, Artificial Sequence
  Description of Artificial Sequence: Synthetic oligonucleotide
gtaagtttacatcctgattatg

SEQ ID NO: 2425 - DNA, 22 bp, Artificial Sequence
  Description of Artificial Sequence: Synthetic oligonucleotide
taagtttacatcctgattatgt

SEQ ID NO: 2426 - DNA, 22 bp, Artificial Sequence
  Description of Artificial Sequence: Synthetic oligonucleotide
atgtaagtttacatcctgatta

SEQ ID NO: 2427 - DNA, 22 bp, Artificial Sequence
  Description of Artificial Sequence: Synthetic oligonucleotide
tgtaagtttacatcctgattat

SEQ ID NO: 2428 - DNA, 22 bp, Artificial Sequence
  Description of Artificial Sequence: Synthetic oligonucleotide
ctatgtaagtttacatcctgat

SEQ ID NO: 2429 - DNA, 22 bp, Artificial Sequence
  Description of Artificial Sequence: Synthetic oligonucleotide
tatgtaagtttacatcctgatt

SEQ ID NO: 2430 - DNA, 22 bp, Artificial Sequence
  Description of Artificial Sequence: Synthetic oligonucleotide
agctatgtaagtttacatcctg

SEQ ID NO: 2431 - DNA, 22 bp, Artificial Sequence
  Description of Artificial Sequence: Synthetic oligonucleotide
gctatgtaagtttacatcctga

SEQ ID NO: 2432 - DNA, 22 bp, Artificial Sequence
  Description of Artificial Sequence: Synthetic oligonucleotide
agggctcttccatataggcagc

SEQ ID NO: 2433 - DNA, 22 bp, Artificial Sequence
  Description of Artificial Sequence: Synthetic oligonucleotide
gggctcttccatataggcagct

SEQ ID NO: 2434 - DNA, 22 bp, Artificial Sequence
  Description of Artificial Sequence: Synthetic oligonucleotide
ggctcttccatataggcagctc

SEQ ID NO: 2435 - DNA, 22 bp, Artificial Sequence
  Description of Artificial Sequence: Synthetic oligonucleotide
gctcttccatataggcagctct

SEQ ID NO: 2436 - DNA, 22 bp, Artificial Sequence
  Description of Artificial Sequence: Synthetic oligonucleotide
cattagggctcttccatatagg

SEQ ID NO: 2437 - DNA, 22 bp, Artificial Sequence
  Description of Artificial Sequence: Synthetic oligonucleotide
attagggctcttccatataggc

SEQ ID NO: 2438 - DNA, 22 bp, Artificial Sequence
  Description of Artificial Sequence: Synthetic oligonucleotide
ttagggctcttccatataggca

SEQ ID NO: 2439 - DNA, 22 bp, Artificial Sequence
  Description of Artificial Sequence: Synthetic oligonucleotide
tagggctcttccatataggcag

SEQ ID NO: 2440 - DNA, 22 bp, Artificial Sequence
  Description of Artificial Sequence: Synthetic oligonucleotide
cacattagggctcttccatata

SEQ ID NO: 2441 - DNA, 22 bp, Artificial Sequence
  Description of Artificial Sequence: Synthetic oligonucleotide
aaaacagcaagaagtgcaacgc

SEQ ID NO: 2442 - DNA, 22 bp, Artificial Sequence
  Description of Artificial Sequence: Synthetic oligonucleotide
aaacagcaagaagtgcaacgcc

SEQ ID NO: 2443 - DNA, 22 bp, Artificial Sequence
  Description of Artificial Sequence: Synthetic oligonucleotide
ttagtagcagcaagattagcag

SEQ ID NO: 2444 - DNA, 22 bp, Artificial Sequence
  Description of Artificial Sequence: Synthetic oligonucleotide
ctcagcagcagatttcttagtg

SEQ ID NO: 2445 - DNA, 22 bp, Artificial Sequence
  Description of Artificial Sequence: Synthetic oligonucleotide
cctcagcagcagatttcttagt

SEQ ID NO: 2446 - DNA, 22 bp, Artificial Sequence
  Description of Artificial Sequence: Synthetic oligonucleotide
cagcagcagatttcttagtgac

SEQ ID NO: 2447 - DNA, 22 bp, Artificial Sequence
  Description of Artificial Sequence: Synthetic oligonucleotide
tcagcagcagatttcttagtga

SEQ ID NO: 2448 - DNA, 22 bp, Artificial Sequence
  Description of Artificial Sequence: Synthetic oligonucleotide
gcagcagatttcttagtgacag

SEQ ID NO: 2449 - DNA, 22 bp, Artificial Sequence
  Description of Artificial Sequence: Synthetic oligonucleotide
agcagatttcttagtgacagtt

SEQ ID NO: 2450 - DNA, 22 bp, Artificial Sequence
  Description of Artificial Sequence: Synthetic oligonucleotide
cagcagatttcttagtgacagt

SEQ ID NO: 2451 - DNA, 22 bp, Artificial Sequence
  Description of Artificial Sequence: Synthetic oligonucleotide
gcctcagcagcagatttcttag

SEQ ID NO: 2452 - DNA, 22 bp, Artificial Sequence
  Description of Artificial Sequence: Synthetic oligonucleotide
agcctcagcagcagatttctta

SEQ ID NO: 2453 - DNA, 22 bp, Artificial Sequence
  Description of Artificial Sequence: Synthetic oligonucleotide
agcagcaagattagcagaagct

SEQ ID NO: 2454 - DNA, 22 bp, Artificial Sequence
  Description of Artificial Sequence: Synthetic oligonucleotide
tagcagcaagattagcagaagc

SEQ ID NO: 2455 - DNA, 22 bp, Artificial Sequence
  Description of Artificial Sequence: Synthetic oligonucleotide
gtagcagcaagattagcagaag

SEQ ID NO: 2456 - DNA, 22 bp, Artificial Sequence
  Description of Artificial Sequence: Synthetic oligonucleotide
agtagcagcaagattagcagaa

SEQ ID NO: 2457 - DNA, 22 bp, Artificial Sequence
  Description of Artificial Sequence: Synthetic oligonucleotide
gcttgacaaatgttaaaaacac

SEQ ID NO: 2458 - DNA, 22 bp, Artificial Sequence
  Description of Artificial Sequence: Synthetic oligonucleotide
agcttgacaaatgttaaaaaca

SEQ ID NO: 2459 - DNA, 22 bp, Artificial Sequence
  Description of Artificial Sequence: Synthetic oligonucleotide
cagcttgacaaatgttaaaaac

SEQ ID NO: 2460 - DNA, 22 bp, Artificial Sequence
  Description of Artificial Sequence: Synthetic oligonucleotide
acagcttgacaaatgttaaaaa

SEQ ID NO: 2461 - DNA, 22 bp, Artificial Sequence
  Description of Artificial Sequence: Synthetic oligonucleotide
cttgacaaatgttaaaaacact

SEQ ID NO: 2462 - DNA, 22 bp, Artificial Sequence
  Description of Artificial Sequence: Synthetic oligonucleotide
tgacagcttgacaaatgttaaa

SEQ ID NO: 2463 - DNA, 22 bp, Artificial Sequence
  Description of Artificial Sequence: Synthetic oligonucleotide
gttccatcactcttagggaatc

SEQ ID NO: 2464 - DNA, 22 bp, Artificial Sequence
  Description of Artificial Sequence: Synthetic oligonucleotide
catcactcttagggaatctagc

SEQ ID NO: 2465 - DNA, 22 bp, Artificial Sequence
  Description of Artificial Sequence: Synthetic oligonucleotide
ccatcactcttagggaatctag

SEQ ID NO: 2466 - DNA, 22 bp, Artificial Sequence
  Description of Artificial Sequence: Synthetic oligonucleotide
tccatcactcttagggaatcta

SEQ ID NO: 2467 - DNA, 22 bp, Artificial Sequence
  Description of Artificial Sequence: Synthetic oligonucleotide
ttccatcactcttagggaatct

SEQ ID NO: 2468 - DNA, 22 bp, Artificial Sequence
  Description of Artificial Sequence: Synthetic oligonucleotide
gataataaagaactgacttaaa

SEQ ID NO: 2469 - DNA, 22 bp, Artificial Sequence
  Description of Artificial Sequence: Synthetic oligonucleotide
ataataaagaactgacttaaag

SEQ ID NO: 2470 - DNA, 22 bp, Artificial Sequence
  Description of Artificial Sequence: Synthetic oligonucleotide
ttgataataaagaactgactta

SEQ ID NO: 2471 - DNA, 22 bp, Artificial Sequence
  Description of Artificial Sequence: Synthetic oligonucleotide
tgataataaagaactgacttaa

SEQ ID NO: 2472 - DNA, 22 bp, Artificial Sequence
  Description of Artificial Sequence: Synthetic oligonucleotide
gttagcattaatacagccacca

SEQ ID NO: 2473 - DNA, 22 bp, Artificial Sequence
  Description of Artificial Sequence: Synthetic oligonucleotide
ttagcattaatacagccaccat

SEQ ID NO: 2474 - DNA, 22 bp, Artificial Sequence
  Description of Artificial Sequence: Synthetic oligonucleotide
tggttagcattaatacagccac

SEQ ID NO: 2475 - DNA, 22 bp, Artificial Sequence
  Description of Artificial Sequence: Synthetic oligonucleotide
ggttagcattaatacagccacc

SEQ ID NO: 2476 - DNA, 22 bp, Artificial Sequence
  Description of Artificial Sequence: Synthetic oligonucleotide
cttggttagcattaatacagcc

SEQ ID NO: 2477 - DNA, 22 bp, Artificial Sequence
  Description of Artificial Sequence: Synthetic oligonucleotide
ttggttagcattaatacagcca

SEQ ID NO: 2478 - DNA, 22 bp, Artificial Sequence
  Description of Artificial Sequence: Synthetic oligonucleotide
acttggttagcattaatacagc

SEQ ID NO: 2479 - DNA, 22 bp, Artificial Sequence
  Description of Artificial Sequence: Synthetic oligonucleotide
tccgcgtggcctcggtgaaaat

SEQ ID NO: 2480 - DNA, 22 bp, Artificial Sequence
  Description of Artificial Sequence: Synthetic oligonucleotide
ctccgcgtggcctcggtgaaaa

SEQ ID NO: 2481 - DNA, 22 bp, Artificial Sequence
  Description of Artificial Sequence: Synthetic oligonucleotide
cgcgtggcctcggtgaaaatgt

SEQ ID NO: 2482 - DNA, 22 bp, Artificial Sequence
  Description of Artificial Sequence: Synthetic oligonucleotide
ccgcgtggcctcggtgaaaatg

SEQ ID NO: 2483 - DNA, 22 bp, Artificial Sequence
  Description of Artificial Sequence: Synthetic oligonucleotide
cgtggcctcggtgaaaatgtgg

SEQ ID NO: 2484 - DNA, 22 bp, Artificial Sequence
  Description of Artificial Sequence: Synthetic oligonucleotide
gcgtggcctcggtgaaaatgtg

SEQ ID NO: 2485 - DNA, 22 bp, Artificial Sequence
  Description of Artificial Sequence: Synthetic oligonucleotide
tggcctcggtgaaaatgtggtg

SEQ ID NO: 2486 - DNA, 22 bp, Artificial Sequence
  Description of Artificial Sequence: Synthetic oligonucleotide
gtggcctcggtgaaaatgtggt

SEQ ID NO: 2487 - DNA, 22 bp, Artificial Sequence
  Description of Artificial Sequence: Synthetic oligonucleotide
actccgcgtggcctcggtgaaa

SEQ ID NO: 2488 - DNA, 22 bp, Artificial Sequence
  Description of Artificial Sequence: Synthetic oligonucleotide
tactccgcgtggcctcggtgaa

SEQ ID NO: 2489 - DNA, 22 bp, Artificial Sequence
  Description of Artificial Sequence: Synthetic oligonucleotide
ttcaacggtaatagtaccgttg

SEQ ID NO: 2490 - DNA, 22 bp, Artificial Sequence
  Description of Artificial Sequence: Synthetic oligonucleotide
cttcaacggtaatagtaccgtt

SEQ ID NO: 2491 - DNA, 22 bp, Artificial Sequence
  Description of Artificial Sequence: Synthetic oligonucleotide
tcttcaacggtaatagtaccgt

SEQ ID NO: 2492 - DNA, 22 bp, Artificial Sequence
  Description of Artificial Sequence: Synthetic oligonucleotide
gctcttcaacggtaatagtacc

SEQ ID NO: 2493 - DNA, 22 bp, Artificial Sequence
  Description of Artificial Sequence: Synthetic oligonucleotide
agctcttcaacggtaatagtac

SEQ ID NO: 2494 - DNA, 22 bp, Artificial Sequence
  Description of Artificial Sequence: Synthetic oligonucleotide
aagctcttcaacggtaatagta

SEQ ID NO: 2495 - DNA, 22 bp, Artificial Sequence
  Description of Artificial Sequence: Synthetic oligonucleotide
taagctcttcaacggtaatagt

SEQ ID NO: 2496 - DNA, 22 bp, Artificial Sequence
  Description of Artificial Sequence: Synthetic oligonucleotide
ttaagctcttcaacggtaatag

SEQ ID NO: 2497 - DNA, 22 bp, Artificial Sequence
  Description of Artificial Sequence: Synthetic oligonucleotide
tttaagctcttcaacggtaata

SEQ ID NO: 2498 - DNA, 22 bp, Artificial Sequence
  Description of Artificial Sequence: Synthetic oligonucleotide
aaatggcttgatctaaagcatt

SEQ ID NO: 2499 - DNA, 22 bp, Artificial Sequence
  Description of Artificial Sequence: Synthetic oligonucleotide
gaaatggcttgatctaaagcat

SEQ ID NO: 2500 - DNA, 22 bp, Artificial Sequence
  Description of Artificial Sequence: Synthetic oligonucleotide
atggcttgatctaaagcattac

SEQ ID NO: 2501 - DNA, 22 bp, Artificial Sequence
  Description of Artificial Sequence: Synthetic oligonucleotide
aatggcttgatctaaagcatta

SEQ ID NO: 2502 - DNA, 22 bp, Artificial Sequence
  Description of Artificial Sequence: Synthetic oligonucleotide
ggcttgatctaaagcattacca

SEQ ID NO: 2503 - DNA, 22 bp, Artificial Sequence
  Description of Artificial Sequence: Synthetic oligonucleotide
tggcttgatctaaagcattacc

SEQ ID NO: 2504 - DNA, 22 bp, Artificial Sequence
  Description of Artificial Sequence: Synthetic oligonucleotide
cttgatctaaagcattaccata

SEQ ID NO: 2505 - DNA, 22 bp, Artificial Sequence
  Description of Artificial Sequence: Synthetic oligonucleotide
gcttgatctaaagcattaccat

SEQ ID NO: 2506 - DNA, 22 bp, Artificial Sequence
  Description of Artificial Sequence: Synthetic oligonucleotide
ggaaatggcttgatctaaagca

SEQ ID NO: 2507 - DNA, 22 bp, Artificial Sequence
  Description of Artificial Sequence: Synthetic oligonucleotide
tggaaatggcttgatctaaagc

SEQ ID NO: 2508 - DNA, 22 bp, Artificial Sequence
  Description of Artificial Sequence: Synthetic oligonucleotide
tggtagctcttcggtagtagcc

SEQ ID NO: 2509 - DNA, 22 bp, Artificial Sequence
  Description of Artificial Sequence: Synthetic oligonucleotide
ctggtagctcttcggtagtagc

SEQ ID NO: 2510 - DNA, 22 bp, Artificial Sequence
  Description of Artificial Sequence: Synthetic oligonucleotide
tctggtagctcttcggtagtag

SEQ ID NO: 2511 - DNA, 22 bp, Artificial Sequence
  Description of Artificial Sequence: Synthetic oligonucleotide
gtctggtagctcttcggtagta

SEQ ID NO: 2512 - DNA, 22 bp, Artificial Sequence
  Description of Artificial Sequence: Synthetic oligonucleotide
agctcttcggtagtagccaatt

SEQ ID NO: 2513 - DNA, 22 bp, Artificial Sequence
  Description of Artificial Sequence: Synthetic oligonucleotide
tagctcttcggtagtagccaat

SEQ ID NO: 2514 - DNA, 22 bp, Artificial Sequence
  Description of Artificial Sequence: Synthetic oligonucleotide
gtagctcttcggtagtagccaa

SEQ ID NO: 2515 - DNA, 22 bp, Artificial Sequence
  Description of Artificial Sequence: Synthetic oligonucleotide
ggtagctcttcggtagtagcca

SEQ ID NO: 2516 - DNA, 22 bp, Artificial Sequence
  Description of Artificial Sequence: Synthetic oligonucleotide
cgtctggtagctcttcggtagt

SEQ ID NO: 2517 - DNA, 22 bp, Artificial Sequence
  Description of Artificial Sequence: Synthetic oligonucleotide
tcgtctggtagctcttcggtag

SEQ ID NO: 2518 - DNA, 22 bp, Artificial Sequence
  Description of Artificial Sequence: Synthetic oligonucleotide
acatactgttctaatgttgaat

SEQ ID NO: 2519 - DNA, 22 bp, Artificial Sequence
  Description of Artificial Sequence: Synthetic oligonucleotide
atactgttctaatgttgaattc

SEQ ID NO: 2520 - DNA, 22 bp, Artificial Sequence
  Description of Artificial Sequence: Synthetic oligonucleotide
catactgttctaatgttgaatt

SEQ ID NO: 2521 - DNA, 22 bp, Artificial Sequence
  Description of Artificial Sequence: Synthetic oligonucleotide
ggtgtgtaggtgcctgtgtagg

SEQ ID NO: 2522 - DNA, 22 bp, Artificial Sequence
  Description of Artificial Sequence: Synthetic oligonucleotide
gtgtgtaggtgcctgtgtagga

SEQ ID NO: 2523 - DNA, 22 bp, Artificial Sequence
  Description of Artificial Sequence: Synthetic oligonucleotide
tgtgtaggtgcctgtgtaggat

SEQ ID NO: 2524 - DNA, 22 bp, Artificial Sequence
  Description of Artificial Sequence: Synthetic oligonucleotide
gtgtaggtgcctgtgtaggatg

SEQ ID NO: 2525 - DNA, 22 bp, Artificial Sequence
  Description of Artificial Sequence: Synthetic oligonucleotide
tgtaggtgcctgtgtaggatgt

SEQ ID NO: 2526 - DNA, 22 bp, Artificial Sequence
  Description of Artificial Sequence: Synthetic oligonucleotide
gtaggtgcctgtgtaggatgta

SEQ ID NO: 2527 - DNA, 22 bp, Artificial Sequence
  Description of Artificial Sequence: Synthetic oligonucleotide
ataattctactacatttatcta

SEQ ID NO: 2528 - DNA, 22 bp, Artificial Sequence
  Description of Artificial Sequence: Synthetic oligonucleotide
tataattctactacatttatct

SEQ ID NO: 2529 - DNA, 22 bp, Artificial Sequence
  Description of Artificial Sequence: Synthetic oligonucleotide
atttcaagacttgtaaattgca

SEQ ID NO: 2530 - DNA, 22 bp, Artificial Sequence
  Description of Artificial Sequence: Synthetic oligonucleotide
tttaggctctgttggtgggaat

SEQ ID NO: 2531 - DNA, 22 bp, Artificial Sequence
  Description of Artificial Sequence: Synthetic oligonucleotide
gtataattctactacatttatc

SEQ ID NO: 2532 - DNA, 22 bp, Artificial Sequence
  Description of Artificial Sequence: Synthetic oligonucleotide
ggtataattctactacatttat

SEQ ID NO: 2533 - DNA, 22 bp, Artificial Sequence
  Description of Artificial Sequence: Synthetic oligonucleotide
tttcttcatgttggtagttaga

SEQ ID NO: 2534 - DNA, 22 bp, Artificial Sequence
  Description of Artificial Sequence: Synthetic oligonucleotide
gtttcttcatgttggtagttag

SEQ ID NO: 2535 - DNA, 22 bp, Artificial Sequence
  Description of Artificial Sequence: Synthetic oligonucleotide
tcttcatgttggtagttagaga

SEQ ID NO: 2536 - DNA, 22 bp, Artificial Sequence
  Description of Artificial Sequence: Synthetic oligonucleotide
cagccaccatcgtaacaatcaa

SEQ ID NO: 2537 - DNA, 22 bp, Artificial Sequence
  Description of Artificial Sequence: Synthetic oligonucleotide
acagccaccatcgtaacaatca

SEQ ID NO: 2538 - DNA, 22 bp, Artificial Sequence
  Description of Artificial Sequence: Synthetic oligonucleotide
caccatcgtaacaatcaaagta

SEQ ID NO: 2539 - DNA, 22 bp, Artificial Sequence
  Description of Artificial Sequence: Synthetic oligonucleotide
ccaccatcgtaacaatcaaagt

SEQ ID NO: 2540 - DNA, 22 bp, Artificial Sequence
  Description of Artificial Sequence: Synthetic oligonucleotide
gccaccatcgtaacaatcaaag

SEQ ID NO: 2541 - DNA, 22 bp, Artificial Sequence
  Description of Artificial Sequence: Synthetic oligonucleotide
agccaccatcgtaacaatcaaa

SEQ ID NO: 2542 - DNA, 22 bp, Artificial Sequence
  Description of Artificial Sequence: Synthetic oligonucleotide
atcgtaacaatcaaagtactta

SEQ ID NO: 2543 - DNA, 22 bp, Artificial Sequence
  Description of Artificial Sequence: Synthetic oligonucleotide
catcgtaacaatcaaagtactt

SEQ ID NO: 2544 - DNA, 22 bp, Artificial Sequence
  Description of Artificial Sequence: Synthetic oligonucleotide
ccatcgtaacaatcaaagtact

SEQ ID NO: 2545 - DNA, 22 bp, Artificial Sequence
  Description of Artificial Sequence: Synthetic oligonucleotide
accatcgtaacaatcaaagtac

SEQ ID NO: 2546 - DNA, 22 bp, Artificial Sequence
  Description of Artificial Sequence: Synthetic oligonucleotide
acagcaaagtcatagaagtctt

SEQ ID NO: 2547 - DNA, 22 bp, Artificial Sequence
  Description of Artificial Sequence: Synthetic oligonucleotide
gtaaacaacagcatcaccatag

SEQ ID NO: 2548 - DNA, 22 bp, Artificial Sequence
  Description of Artificial Sequence: Synthetic oligonucleotide
tattaacgtacctgtctcttcc

SEQ ID NO: 2549 - DNA, 22 bp, Artificial Sequence
  Description of Artificial Sequence: Synthetic oligonucleotide
ggtggtgctgacatcataacaa

SEQ ID NO: 2550 - DNA, 22 bp, Artificial Sequence
  Description of Artificial Sequence: Synthetic oligonucleotide
aactacagccataacctttcca

SEQ ID NO: 2551 - DNA, 22 bp, Artificial Sequence
  Description of Artificial Sequence: Synthetic oligonucleotide
caactacagccataacctttcc

SEQ ID NO: 2552 - DNA, 22 bp, Artificial Sequence
  Description of Artificial Sequence: Synthetic oligonucleotide
acaactacagccataacctttc

SEQ ID NO: 2553 - DNA, 22 bp, Artificial Sequence
  Description of Artificial Sequence: Synthetic oligonucleotide
cacaactacagccataaccttt

SEQ ID NO: 2554 - DNA, 22 bp, Artificial Sequence
  Description of Artificial Sequence: Synthetic oligonucleotide
acagccataacctttccacata

SEQ ID NO: 2555 - DNA, 22 bp, Artificial Sequence
  Description of Artificial Sequence: Synthetic oligonucleotide
tacagccataacctttccacat

SEQ ID NO: 2556 - DNA, 22 bp, Artificial Sequence
  Description of Artificial Sequence: Synthetic oligonucleotide
ctacagccataacctttccaca

SEQ ID NO: 2557 - DNA, 22 bp, Artificial Sequence
  Description of Artificial Sequence: Synthetic oligonucleotide
actacagccataacctttccac

SEQ ID NO: 2558 - DNA, 22 bp, Artificial Sequence
  Description of Artificial Sequence: Synthetic oligonucleotide
tcacaactacagccataacctt

SEQ ID NO: 2559 - DNA, 22 bp, Artificial Sequence
  Description of Artificial Sequence: Synthetic oligonucleotide
atcacaactacagccataacct

SEQ ID NO: 2560 - DNA, 22 bp, Artificial Sequence
  Description of Artificial Sequence: Synthetic oligonucleotide
gagcaaaattcatgaggtcctt

SEQ ID NO: 2561 - DNA, 22 bp, Artificial Sequence
  Description of Artificial Sequence: Synthetic oligonucleotide
agcaaaattcatgaggtccttt

SEQ ID NO: 2562 - DNA, 22 bp, Artificial Sequence
  Description of Artificial Sequence: Synthetic oligonucleotide
aaaattcatgaggtcctttagt

SEQ ID NO: 2563 - DNA, 22 bp, Artificial Sequence
  Description of Artificial Sequence: Synthetic oligonucleotide
aaattcatgaggtcctttagta

SEQ ID NO: 2564 - DNA, 22 bp, Artificial Sequence
  Description of Artificial Sequence: Synthetic oligonucleotide
gcaaaattcatgaggtccttta

SEQ ID NO: 2565 - DNA, 22 bp, Artificial Sequence
  Description of Artificial Sequence: Synthetic oligonucleotide
caaaattcatgaggtcctttag

SEQ ID NO: 2566 - DNA, 22 bp, Artificial Sequence
  Description of Artificial Sequence: Synthetic oligonucleotide
caacacgcttaacaaagcactc

SEQ ID NO: 2567 - DNA, 22 bp, Artificial Sequence
  Description of Artificial Sequence: Synthetic oligonucleotide
tcaacacgcttaacaaagcact

SEQ ID NO: 2568 - DNA, 22 bp, Artificial Sequence
  Description of Artificial Sequence: Synthetic oligonucleotide
acatttgggtcatagcttgatc

SEQ ID NO: 2569 - DNA, 22 bp, Artificial Sequence
  Description of Artificial Sequence: Synthetic oligonucleotide
tacatttgggtcatagcttgat

SEQ ID NO: 2570 - DNA, 22 bp, Artificial Sequence
  Description of Artificial Sequence: Synthetic oligonucleotide
aactagcaagaataccacgaaa

SEQ ID NO: 2571 - DNA, 22 bp, Artificial Sequence
  Description of Artificial Sequence: Synthetic oligonucleotide
actagcaagaataccacgaaag

SEQ ID NO: 2572 - DNA, 22 bp, Artificial Sequence
  Description of Artificial Sequence: Synthetic oligonucleotide
ctagcaagaataccacgaaagc

SEQ ID NO: 2573 - DNA, 22 bp, Artificial Sequence
  Description of Artificial Sequence: Synthetic oligonucleotide
tagcaagaataccacgaaagca

SEQ ID NO: 2574 - DNA, 22 bp, Artificial Sequence
  Description of Artificial Sequence: Synthetic oligonucleotide
agcaagaataccacgaaagcaa

SEQ ID NO: 2575 - DNA, 22 bp, Artificial Sequence
  Description of Artificial Sequence: Synthetic oligonucleotide
gcaagaataccacgaaagcaag

SEQ ID NO: 2576 - DNA, 22 bp, Artificial Sequence
  Description of Artificial Sequence: Synthetic oligonucleotide
caagaataccacgaaagcaaga

SEQ ID NO: 2577 - DNA, 22 bp, Artificial Sequence
  Description of Artificial Sequence: Synthetic oligonucleotide
aagaataccacgaaagcaagaa

SEQ ID NO: 2578 - DNA, 22 bp, Artificial Sequence
  Description of Artificial Sequence: Synthetic oligonucleotide
gtaactagcaagaataccacga

SEQ ID NO: 2579 - DNA, 22 bp, Artificial Sequence
  Description of Artificial Sequence: Synthetic oligonucleotide
taactagcaagaataccacgaa

SEQ ID NO: 2580 - DNA, 22 bp, Artificial Sequence
  Description of Artificial Sequence: Synthetic oligonucleotide
ttgattgtccaagtacacactc

SEQ ID NO: 2581 - DNA, 22 bp, Artificial Sequence
  Description of Artificial Sequence: Synthetic oligonucleotide
tttagtagcagcaagattagca

SEQ ID NO: 2582 - DNA, 22 bp, Artificial Sequence
  Description of Artificial Sequence: Synthetic oligonucleotide
ttgttccttgaggaagttgtag

SEQ ID NO: 2583 - DNA, 22 bp, Artificial Sequence
  Description of Artificial Sequence: Synthetic oligonucleotide
gttgttccttgaggaagttgta

SEQ ID NO: 2584 - DNA, 22 bp, Artificial Sequence
  Description of Artificial Sequence: Synthetic oligonucleotide
tccttgaggaagttgtagcacg

SEQ ID NO: 2585 - DNA, 22 bp, Artificial Sequence
  Description of Artificial Sequence: Synthetic oligonucleotide
ttccttgaggaagttgtagcac

SEQ ID NO: 2586 - DNA, 22 bp, Artificial Sequence
  Description of Artificial Sequence: Synthetic oligonucleotide
gttccttgaggaagttgtagca

SEQ ID NO: 2587 - DNA, 22 bp, Artificial Sequence
  Description of Artificial Sequence: Synthetic oligonucleotide
tgttccttgaggaagttgtagc

SEQ ID NO: 2588 - DNA, 22 bp, Artificial Sequence
  Description of Artificial Sequence: Synthetic oligonucleotide
cttgaggaagttgtagcacgat

SEQ ID NO: 2589 - DNA, 22 bp, Artificial Sequence
  Description of Artificial Sequence: Synthetic oligonucleotide
ccttgaggaagttgtagcacga

SEQ ID NO: 2590 - DNA, 22 bp, Artificial Sequence
  Description of Artificial Sequence: Synthetic oligonucleotide
cagttgcaacccatatgatgcc

SEQ ID NO: 2591 - DNA, 22 bp, Artificial Sequence
  Description of Artificial Sequence: Synthetic oligonucleotide
tcagttgcaacccatatgatgc

SEQ ID NO: 2592 - DNA, 22 bp, Artificial Sequence
  Description of Artificial Sequence: Synthetic oligonucleotide
ctcagttgcaacccatatgatg

SEQ ID NO: 2593 - DNA, 22 bp, Artificial Sequence
  Description of Artificial Sequence: Synthetic oligonucleotide
aagtcacaaaatcctttaggat

SEQ ID NO: 2594 - DNA, 22 bp, Artificial Sequence
  Description of Artificial Sequence: Synthetic oligonucleotide
ctaccacatgaaccattaagga

SEQ ID NO: 2595 - DNA, 22 bp, Artificial Sequence
  Description of Artificial Sequence: Synthetic oligonucleotide
taccacatgaaccattaaggaa

SEQ ID NO: 2596 - DNA, 22 bp, Artificial Sequence
  Description of Artificial Sequence: Synthetic oligonucleotide
caaggctctccatcttaccttt

SEQ ID NO: 2597 - DNA, 22 bp, Artificial Sequence
  Description of Artificial Sequence: Synthetic oligonucleotide
acaaggctctccatcttacctt

SEQ ID NO: 2598 - DNA, 22 bp, Artificial Sequence
  Description of Artificial Sequence: Synthetic oligonucleotide
gacaaggctctccatcttacct

SEQ ID NO: 2599 - DNA, 22 bp, Artificial Sequence
  Description of Artificial Sequence: Synthetic oligonucleotide
ggacaaggctctccatcttacc

SEQ ID NO: 2600 - DNA, 22 bp, Artificial Sequence
  Description of Artificial Sequence: Synthetic oligonucleotide
gctctccatcttacctttcggt

SEQ ID NO: 2601 - DNA, 22 bp, Artificial Sequence
  Description of Artificial Sequence: Synthetic oligonucleotide
ggctctccatcttacctttcgg

SEQ ID NO: 2602 - DNA, 22 bp, Artificial Sequence
  Description of Artificial Sequence: Synthetic oligonucleotide
aggctctccatcttacctttcg

SEQ ID NO: 2603 - DNA, 22 bp, Artificial Sequence
  Description of Artificial Sequence: Synthetic oligonucleotide
aaggctctccatcttacctttc

SEQ ID NO: 2604 - DNA, 22 bp, Artificial Sequence
  Description of Artificial Sequence: Synthetic oligonucleotide
caattgtatgtgacaagtattt

SEQ ID NO: 2605 - DNA, 22 bp, Artificial Sequence
  Description of Artificial Sequence: Synthetic oligonucleotide
attgtatgtgacaagtatttct

SEQ ID NO: 2606 - DNA, 22 bp, Artificial Sequence
  Description of Artificial Sequence: Synthetic oligonucleotide
aattgtatgtgacaagtatttc

SEQ ID NO: 2607 - DNA, 22 bp, Artificial Sequence
  Description of Artificial Sequence: Synthetic oligonucleotide
ttgtatgtgacaagtatttctt

SEQ ID NO: 2608 - DNA, 22 bp, Artificial Sequence
  Description of Artificial Sequence: Synthetic oligonucleotide
ttataacgatagtagtcataat

SEQ ID NO: 2609 - DNA, 22 bp, Artificial Sequence
  Description of Artificial Sequence: Synthetic oligonucleotide
attataacgatagtagtcataa

SEQ ID NO: 2610 - DNA, 22 bp, Artificial Sequence
  Description of Artificial Sequence: Synthetic oligonucleotide
gattataacgatagtagtcata

SEQ ID NO: 2611 - DNA, 22 bp, Artificial Sequence
  Description of Artificial Sequence: Synthetic oligonucleotide
agattataacgatagtagtcat

SEQ ID NO: 2612 - DNA, 22 bp, Artificial Sequence
  Description of Artificial Sequence: Synthetic oligonucleotide
tataacgatagtagtcataatc

SEQ ID NO: 2613 - DNA, 22 bp, Artificial Sequence
  Description of Artificial Sequence: Synthetic oligonucleotide
gcatcacaactagctacatgtg

SEQ ID NO: 2614 - DNA, 22 bp, Artificial Sequence
  Description of Artificial Sequence: Synthetic oligonucleotide
atcacaactagctacatgtgca

SEQ ID NO: 2615 - DNA, 22 bp, Artificial Sequence
  Description of Artificial Sequence: Synthetic oligonucleotide
catcacaactagctacatgtgc

SEQ ID NO: 2616 - DNA, 22 bp, Artificial Sequence
  Description of Artificial Sequence: Synthetic oligonucleotide
cacaactagctacatgtgcatt

SEQ ID NO: 2617 - DNA, 22 bp, Artificial Sequence
  Description of Artificial Sequence: Synthetic oligonucleotide
tcacaactagctacatgtgcat

SEQ ID NO: 2618 - DNA, 22 bp, Artificial Sequence
  Description of Artificial Sequence: Synthetic oligonucleotide
gttcgtttagaccagaagatca

SEQ ID NO: 2619 - DNA, 22 bp, Artificial Sequence
  Description of Artificial Sequence: Synthetic oligonucleotide
tttagttcgtttagaccagaag

SEQ ID NO: 2620 - DNA, 22 bp, Artificial Sequence
  Description of Artificial Sequence: Synthetic oligonucleotide
ttagttcgtttagaccagaaga

SEQ ID NO: 2621 - DNA, 22 bp, Artificial Sequence
  Description of Artificial Sequence: Synthetic oligonucleotide
tagttcgtttagaccagaagat

SEQ ID NO: 2622 - DNA, 22 bp, Artificial Sequence
  Description of Artificial Sequence: Synthetic oligonucleotide
agttcgtttagaccagaagatc

SEQ ID NO: 2623 - DNA, 22 bp, Artificial Sequence
  Description of Artificial Sequence: Synthetic oligonucleotide
tatttagttcgtttagaccaga

SEQ ID NO: 2624 - DNA, 22 bp, Artificial Sequence
  Description of Artificial Sequence: Synthetic oligonucleotide
atttagttcgtttagaccagaa

SEQ ID NO: 2625 - DNA, 22 bp, Artificial Sequence
  Description of Artificial Sequence: Synthetic oligonucleotide
ttgtagtcccagatcacagtat

SEQ ID NO: 2626 - DNA, 22 bp, Artificial Sequence
  Description of Artificial Sequence: Synthetic oligonucleotide
tgtagtcccagatcacagtatt

SEQ ID NO: 2627 - DNA, 22 bp, Artificial Sequence
  Description of Artificial Sequence: Synthetic oligonucleotide
ctcccaatttgtaataagaaag

SEQ ID NO: 2628 - DNA, 22 bp, Artificial Sequence
  Description of Artificial Sequence: Synthetic oligonucleotide
gctcccaatttgtaataagaaa

SEQ ID NO: 2629 - DNA, 22 bp, Artificial Sequence
  Description of Artificial Sequence: Synthetic oligonucleotide
cccaatttgtaataagaaagcg

SEQ ID NO: 2630 - DNA, 22 bp, Artificial Sequence
  Description of Artificial Sequence: Synthetic oligonucleotide
tcccaatttgtaataagaaagc

SEQ ID NO: 2631 - DNA, 22 bp, Artificial Sequence
  Description of Artificial Sequence: Synthetic oligonucleotide
tatttaggttgtttaatccttt

SEQ ID NO: 2632 - DNA, 22 bp, Artificial Sequence
  Description of Artificial Sequence: Synthetic oligonucleotide
ctatttaggttgtttaatcctt

SEQ ID NO: 2633 - DNA, 22 bp, Artificial Sequence
  Description of Artificial Sequence: Synthetic oligonucleotide
tctatttaggttgtttaatcct

SEQ ID NO: 2634 - DNA, 22 bp, Artificial Sequence
  Description of Artificial Sequence: Synthetic oligonucleotide
ctctatttaggttgtttaatcc

SEQ ID NO: 2635 - DNA, 22 bp, Artificial Sequence
  Description of Artificial Sequence: Synthetic oligonucleotide
cctctatttaggttgtttaatc

SEQ ID NO: 2636 - DNA, 22 bp, Artificial Sequence
  Description of Artificial Sequence: Synthetic oligonucleotide
acctctatttaggttgtttaat

SEQ ID NO: 2637 - DNA, 22 bp, Artificial Sequence
  Description of Artificial Sequence: Synthetic oligonucleotide
gaagcagaaaaagatgccaaaa

SEQ ID NO: 2638 - DNA, 22 bp, Artificial Sequence
  Description of Artificial Sequence: Synthetic oligonucleotide
tggtggttggtaaagaacatca

SEQ ID NO: 2639 - DNA, 22 bp, Artificial Sequence
  Description of Artificial Sequence: Synthetic oligonucleotide
gtggtggttggtaaagaacatc

SEQ ID NO: 2640 - DNA, 22 bp, Artificial Sequence
  Description of Artificial Sequence: Synthetic oligonucleotide
tttgtgctccaaagacaacgta

SEQ ID NO: 2641 - DNA, 22 bp, Artificial Sequence
  Description of Artificial Sequence: Synthetic oligonucleotide
tccaaagacaacgtatacacca

SEQ ID NO: 2642 - DNA, 22 bp, Artificial Sequence
  Description of Artificial Sequence: Synthetic oligonucleotide
ctccaaagacaacgtatacacc

SEQ ID NO: 2643 - DNA, 22 bp, Artificial Sequence
  Description of Artificial Sequence: Synthetic oligonucleotide
catctggtgatgtatgattctt

SEQ ID NO: 2644 - DNA, 22 bp, Artificial Sequence
  Description of Artificial Sequence: Synthetic oligonucleotide
ttcgtttagaccagaagatcag

SEQ ID NO: 2645 - DNA, 22 bp, Artificial Sequence
  Description of Artificial Sequence: Synthetic oligonucleotide
tcgtttagaccagaagatcagg

SEQ ID NO: 2646 - DNA, 22 bp, Artificial Sequence
  Description of Artificial Sequence: Synthetic oligonucleotide
cgtttagaccagaagatcagga

SEQ ID NO: 2647 - DNA, 22 bp, Artificial Sequence
  Description of Artificial Sequence: Synthetic oligonucleotide
tatacgacatcagtactagtgc

SEQ ID NO: 2648 - DNA, 22 bp, Artificial Sequence
  Description of Artificial Sequence: Synthetic oligonucleotide
atacgacatcagtactagtgcc

SEQ ID NO: 2649 - DNA, 22 bp, Artificial Sequence
  Description of Artificial Sequence: Synthetic oligonucleotide
tacgacatcagtactagtgcct

SEQ ID NO: 2650 - DNA, 22 bp, Artificial Sequence
  Description of Artificial Sequence: Synthetic oligonucleotide
acgacatcagtactagtgcctg

SEQ ID NO: 2651 - DNA, 22 bp, Artificial Sequence
  Description of Artificial Sequence: Synthetic oligonucleotide
cgacatcagtactagtgcctgt

SEQ ID NO: 2652 - DNA, 22 bp, Artificial Sequence
  Description of Artificial Sequence: Synthetic oligonucleotide
gacatcagtactagtgcctgtg

SEQ ID NO: 2653 - DNA, 22 bp, Artificial Sequence
  Description of Artificial Sequence: Synthetic oligonucleotide
acatcagtactagtgcctgtgc

SEQ ID NO: 2654 - DNA, 22 bp, Artificial Sequence
  Description of Artificial Sequence: Synthetic oligonucleotide
catcagtactagtgcctgtgcc

SEQ ID NO: 2655 - DNA, 22 bp, Artificial Sequence
  Description of Artificial Sequence: Synthetic oligonucleotide
tgtatacgacatcagtactagt

SEQ ID NO: 2656 - DNA, 22 bp, Artificial Sequence
  Description of Artificial Sequence: Synthetic oligonucleotide
gtatacgacatcagtactagtg

SEQ ID NO: 2657 - DNA, 22 bp, Artificial Sequence
  Description of Artificial Sequence: Synthetic oligonucleotide
ggtttaatgttgcgcttagccc

SEQ ID NO: 2658 - DNA, 22 bp, Artificial Sequence
  Description of Artificial Sequence: Synthetic oligonucleotide
tggtttaatgttgcgcttagcc

SEQ ID NO: 2659 - DNA, 22 bp, Artificial Sequence
  Description of Artificial Sequence: Synthetic oligonucleotide
gttgcgcttagcccaaagctca

SEQ ID NO: 2660 - DNA, 22 bp, Artificial Sequence
  Description of Artificial Sequence: Synthetic oligonucleotide
tgttgcgcttagcccaaagctc

SEQ ID NO: 2661 - DNA, 22 bp, Artificial Sequence
  Description of Artificial Sequence: Synthetic oligonucleotide
atgttgcgcttagcccaaagct

SEQ ID NO: 2662 - DNA, 22 bp, Artificial Sequence
  Description of Artificial Sequence: Synthetic oligonucleotide
aatgttgcgcttagcccaaagc

SEQ ID NO: 2663 - DNA, 22 bp, Artificial Sequence
  Description of Artificial Sequence: Synthetic oligonucleotide
taatgttgcgcttagcccaaag

SEQ ID NO: 2664 - DNA, 22 bp, Artificial Sequence
  Description of Artificial Sequence: Synthetic oligonucleotide
ttaatgttgcgcttagcccaaa

SEQ ID NO: 2665 - DNA, 22 bp, Artificial Sequence
  Description of Artificial Sequence: Synthetic oligonucleotide
tttaatgttgcgcttagcccaa

SEQ ID NO: 2666 - DNA, 22 bp, Artificial Sequence
  Description of Artificial Sequence: Synthetic oligonucleotide
gtttaatgttgcgcttagccca

SEQ ID NO: 2667 - DNA, 22 bp, Artificial Sequence
  Description of Artificial Sequence: Synthetic oligonucleotide
gcttgttccaattactacagta

SEQ ID NO: 2668 - DNA, 22 bp, Artificial Sequence
  Description of Artificial Sequence: Synthetic oligonucleotide
cttgttccaattactacagtag

SEQ ID NO: 2669 - DNA, 22 bp, Artificial Sequence
  Description of Artificial Sequence: Synthetic oligonucleotide
ttgcttgttccaattactacag

SEQ ID NO: 2670 - DNA, 22 bp, Artificial Sequence
  Description of Artificial Sequence: Synthetic oligonucleotide
tgcttgttccaattactacagt

SEQ ID NO: 2671 - DNA, 22 bp, Artificial Sequence
  Description of Artificial Sequence: Synthetic oligonucleotide
gttccaattactacagtagctc

SEQ ID NO: 2672 - DNA, 22 bp, Artificial Sequence
  Description of Artificial Sequence: Synthetic oligonucleotide
ttccaattactacagtagctcc

SEQ ID NO: 2673 - DNA, 22 bp, Artificial Sequence
  Description of Artificial Sequence: Synthetic oligonucleotide
ttgttccaattactacagtagc

SEQ ID NO: 2674 - DNA, 22 bp, Artificial Sequence
  Description of Artificial Sequence: Synthetic oligonucleotide
tgttccaattactacagtagct

SEQ ID NO: 2675 - DNA, 22 bp, Artificial Sequence
  Description of Artificial Sequence: Synthetic oligonucleotide
accaggtggtccctggagtgta

SEQ ID NO: 2676 - DNA, 22 bp, Artificial Sequence
  Description of Artificial Sequence: Synthetic oligonucleotide
caggtggtccctggagtgtaga

SEQ ID NO: 2677 - DNA, 22 bp, Artificial Sequence
  Description of Artificial Sequence: Synthetic oligonucleotide
ttgtgcttacaaaggcacgcta

SEQ ID NO: 2678 - DNA, 22 bp, Artificial Sequence
  Description of Artificial Sequence: Synthetic oligonucleotide
cttgtgcttacaaaggcacgct

SEQ ID NO: 2679 - DNA, 22 bp, Artificial Sequence
  Description of Artificial Sequence: Synthetic oligonucleotide
gtgcttacaaaggcacgctagt

SEQ ID NO: 2680 - DNA, 22 bp, Artificial Sequence
  Description of Artificial Sequence: Synthetic oligonucleotide
tgtgcttacaaaggcacgctag

SEQ ID NO: 2681 - DNA, 22 bp, Artificial Sequence
  Description of Artificial Sequence: Synthetic oligonucleotide
gcttgtgcttacaaaggcacgc

SEQ ID NO: 2682 - DNA, 22 bp, Artificial Sequence
  Description of Artificial Sequence: Synthetic oligonucleotide
aaaacgtttatatagcccatct

SEQ ID NO: 2683 - DNA, 22 bp, Artificial Sequence
  Description of Artificial Sequence: Synthetic oligonucleotide
aaacgtttatatagcccatctg

SEQ ID NO: 2684 - DNA, 22 bp, Artificial Sequence
  Description of Artificial Sequence: Synthetic oligonucleotide
tttatatagcccatctgccttg

SEQ ID NO: 2685 - DNA, 22 bp, Artificial Sequence
  Description of Artificial Sequence: Synthetic oligonucleotide
ttatatagcccatctgccttgt

SEQ ID NO: 2686 - DNA, 22 bp, Artificial Sequence
  Description of Artificial Sequence: Synthetic oligonucleotide
tatatagcccatctgccttgtg

SEQ ID NO: 2687 - DNA, 22 bp, Artificial Sequence
  Description of Artificial Sequence: Synthetic oligonucleotide
atatagcccatctgccttgtgt

SEQ ID NO: 2688 - DNA, 22 bp, Artificial Sequence
  Description of Artificial Sequence: Synthetic oligonucleotide
aacgtttatatagcccatctgc

SEQ ID NO: 2689 - DNA, 22 bp, Artificial Sequence
  Description of Artificial Sequence: Synthetic oligonucleotide
acgtttatatagcccatctgcc

SEQ ID NO: 2690 - DNA, 22 bp, Artificial Sequence
  Description of Artificial Sequence: Synthetic oligonucleotide
cgtttatatagcccatctgcct

SEQ ID NO: 2691 - DNA, 22 bp, Artificial Sequence
  Description of Artificial Sequence: Synthetic oligonucleotide
gtttatatagcccatctgcctt

SEQ ID NO: 2692 - DNA, 22 bp, Artificial Sequence
  Description of Artificial Sequence: Synthetic oligonucleotide
ggtgctgacatcataacaaaag

SEQ ID NO: 2693 - DNA, 22 bp, Artificial Sequence
  Description of Artificial Sequence: Synthetic oligonucleotide
gtggtgctgacatcataacaaa

SEQ ID NO: 2694 - DNA, 22 bp, Artificial Sequence
  Description of Artificial Sequence: Synthetic oligonucleotide
tggtgctgacatcataacaaaa

SEQ ID NO: 2695 - DNA, 22 bp, Artificial Sequence
  Description of Artificial Sequence: Synthetic oligonucleotide
gttatagtagggatgacattac

SEQ ID NO: 2696 - DNA, 22 bp, Artificial Sequence
  Description of Artificial Sequence: Synthetic oligonucleotide
agttatagtagggatgacatta

SEQ ID NO: 2697 - DNA, 22 bp, Artificial Sequence
  Description of Artificial Sequence: Synthetic oligonucleotide
gtatatgcgaaaagtgcatctt

SEQ ID NO: 2698 - DNA, 22 bp, Artificial Sequence
  Description of Artificial Sequence: Synthetic oligonucleotide
tagtagggatgacattacgttt

SEQ ID NO: 2699 - DNA, 22 bp, Artificial Sequence
  Description of Artificial Sequence: Synthetic oligonucleotide
atagtagggatgacattacgtt

SEQ ID NO: 2700 - DNA, 22 bp, Artificial Sequence
  Description of Artificial Sequence: Synthetic oligonucleotide
tatagtagggatgacattacgt

SEQ ID NO: 2701 - DNA, 22 bp, Artificial Sequence
  Description of Artificial Sequence: Synthetic oligonucleotide
ttatagtagggatgacattacg

SEQ ID NO: 2702 - DNA, 22 bp, Artificial Sequence
  Description of Artificial Sequence: Synthetic oligonucleotide
gaaccaagacgcagtattattg

SEQ ID NO: 2703 - DNA, 22 bp, Artificial Sequence
  Description of Artificial Sequence: Synthetic oligonucleotide
aaccaagacgcagtattattgg

SEQ ID NO: 2704 - DNA, 22 bp, Artificial Sequence
  Description of Artificial Sequence: Synthetic oligonucleotide
caagttccgaggaacatgtctg

SEQ ID NO: 2705 - DNA, 22 bp, Artificial Sequence
  Description of Artificial Sequence: Synthetic oligonucleotide
acaaagtcattaagatctgaat

SEQ ID NO: 2706 - DNA, 22 bp, Artificial Sequence
  Description of Artificial Sequence: Synthetic oligonucleotide
ttaagatctgaatcgacaagca

SEQ ID NO: 2707 - DNA, 22 bp, Artificial Sequence
  Description of Artificial Sequence: Synthetic oligonucleotide
aaagtcattaagatctgaatcg

SEQ ID NO: 2708 - DNA, 22 bp, Artificial Sequence
  Description of Artificial Sequence: Synthetic oligonucleotide
acaagagtagactatatatcgt

SEQ ID NO: 2709 - DNA, 22 bp, Artificial Sequence
  Description of Artificial Sequence: Synthetic oligonucleotide
taaaatgtcaagtacaagtaaa

SEQ ID NO: 2710 - DNA, 22 bp, Artificial Sequence
  Description of Artificial Sequence: Synthetic oligonucleotide
ataaaatgtcaagtacaagtaa

SEQ ID NO: 2711 - DNA, 22 bp, Artificial Sequence
  Description of Artificial Sequence: Synthetic oligonucleotide
atatgacatagtcatattctga

SEQ ID NO: 2712 - DNA, 22 bp, Artificial Sequence
  Description of Artificial Sequence: Synthetic oligonucleotide
gaatatgacatagtcatattct

SEQ ID NO: 2713 - DNA, 22 bp, Artificial Sequence
  Description of Artificial Sequence: Synthetic oligonucleotide
aatatgacatagtcatattctg

SEQ ID NO: 2714 - DNA, 22 bp, Artificial Sequence
  Description of Artificial Sequence: Synthetic oligonucleotide
ttgacagtttgaaaagcaacat

SEQ ID NO: 2715 - DNA, 22 bp, Artificial Sequence
  Description of Artificial Sequence: Synthetic oligonucleotide
tgacagtttgaaaagcaacatt

SEQ ID NO: 2716 - DNA, 22 bp, Artificial Sequence
  Description of Artificial Sequence: Synthetic oligonucleotide
cagtttgaaaagcaacattgtt

SEQ ID NO: 2717 - DNA, 22 bp, Artificial Sequence
  Description of Artificial Sequence: Synthetic oligonucleotide
agtttgaaaagcaacattgtta

SEQ ID NO: 2718 - DNA, 22 bp, Artificial Sequence
  Description of Artificial Sequence: Synthetic oligonucleotide
gacagtttgaaaagcaacattg

SEQ ID NO: 2719 - DNA, 22 bp, Artificial Sequence
  Description of Artificial Sequence: Synthetic oligonucleotide
acagtttgaaaagcaacattgt

SEQ ID NO: 2720 - DNA, 22 bp, Artificial Sequence
  Description of Artificial Sequence: Synthetic oligonucleotide
gtttgaaaagcaacattgttag

SEQ ID NO: 2721 - DNA, 22 bp, Artificial Sequence
  Description of Artificial Sequence: Synthetic oligonucleotide
tttgaaaagcaacattgttagt

SEQ ID NO: 2722 - DNA, 22 bp, Artificial Sequence
  Description of Artificial Sequence: Synthetic oligonucleotide
aatatctctgctatagtaacct

SEQ ID NO: 2723 - DNA, 22 bp, Artificial Sequence
  Description of Artificial Sequence: Synthetic oligonucleotide
atatctctgctatagtaacctg

SEQ ID NO: 2724 - DNA, 22 bp, Artificial Sequence
  Description of Artificial Sequence: Synthetic oligonucleotide
agtttgtaatattaggaaatct

SEQ ID NO: 2725 - DNA, 22 bp, Artificial Sequence
  Description of Artificial Sequence: Synthetic oligonucleotide
aggcttgtatcggtatcgttgc

SEQ ID NO: 2726 - DNA, 22 bp, Artificial Sequence
  Description of Artificial Sequence: Synthetic oligonucleotide
gaggcttgtatcggtatcgttg

SEQ ID NO: 2727 - DNA, 22 bp, Artificial Sequence
  Description of Artificial Sequence: Synthetic oligonucleotide
tgaaattgcaccaaaattggag

SEQ ID NO: 2728 - DNA, 22 bp, Artificial Sequence
  Description of Artificial Sequence: Synthetic oligonucleotide
ttgcaccaaaattggagctaag

SEQ ID NO: 2729 - DNA, 22 bp, Artificial Sequence
  Description of Artificial Sequence: Synthetic oligonucleotide
tgcaccaaaattggagctaagt

SEQ ID NO: 2730 - DNA, 22 bp, Artificial Sequence
  Description of Artificial Sequence: Synthetic oligonucleotide
gcaccaaaattggagctaagtt

SEQ ID NO: 2731 - DNA, 22 bp, Artificial Sequence
  Description of Artificial Sequence: Synthetic oligonucleotide
caccaaaattggagctaagttg

SEQ ID NO: 2732 - DNA, 22 bp, Artificial Sequence
  Description of Artificial Sequence: Synthetic oligonucleotide
gaaattgcaccaaaattggagc

SEQ ID NO: 2733 - DNA, 22 bp, Artificial Sequence
  Description of Artificial Sequence: Synthetic oligonucleotide
aaattgcaccaaaattggagct

SEQ ID NO: 2734 - DNA, 22 bp, Artificial Sequence
  Description of Artificial Sequence: Synthetic oligonucleotide
aattgcaccaaaattggagcta

SEQ ID NO: 2735 - DNA, 22 bp, Artificial Sequence
  Description of Artificial Sequence: Synthetic oligonucleotide
attgcaccaaaattggagctaa

SEQ ID NO: 2736 - DNA, 22 bp, Artificial Sequence
  Description of Artificial Sequence: Synthetic oligonucleotide
gtacttcatagccacaaggtta

SEQ ID NO: 2737 - DNA, 22 bp, Artificial Sequence
  Description of Artificial Sequence: Synthetic oligonucleotide
tgtacttcatagccacaaggtt

SEQ ID NO: 2738 - DNA, 22 bp, Artificial Sequence
  Description of Artificial Sequence: Synthetic oligonucleotide
ttgtacttcatagccacaaggt

SEQ ID NO: 2739 - DNA, 22 bp, Artificial Sequence
  Description of Artificial Sequence: Synthetic oligonucleotide
gcacaaatagaagtcaattaat

SEQ ID NO: 2740 - DNA, 22 bp, Artificial Sequence
  Description of Artificial Sequence: Synthetic oligonucleotide
cacaaatagaagtcaattaatg

SEQ ID NO: 2741 - DNA, 22 bp, Artificial Sequence
  Description of Artificial Sequence: Synthetic oligonucleotide
aaagcttgagtctttcagtaca

SEQ ID NO: 2742 - DNA, 22 bp, Artificial Sequence
  Description of Artificial Sequence: Synthetic oligonucleotide
aaaagcttgagtctttcagtac

SEQ ID NO: 2743 - DNA, 22 bp, Artificial Sequence
  Description of Artificial Sequence: Synthetic oligonucleotide
gttaacacctgtagaaaaacct

SEQ ID NO: 2744 - DNA, 22 bp, Artificial Sequence
  Description of Artificial Sequence: Synthetic oligonucleotide
actaggttaacacctgtagaaa

SEQ ID NO: 2745 - DNA, 22 bp, Artificial Sequence
  Description of Artificial Sequence: Synthetic oligonucleotide
ctaggttaacacctgtagaaaa

SEQ ID NO: 2746 - DNA, 22 bp, Artificial Sequence
  Description of Artificial Sequence: Synthetic oligonucleotide
gtctgtaacaaacctacaaggt

SEQ ID NO: 2747 - DNA, 22 bp, Artificial Sequence
  Description of Artificial Sequence: Synthetic oligonucleotide
tctgtaacaaacctacaaggtg

SEQ ID NO: 2748 - DNA, 22 bp, Artificial Sequence
  Description of Artificial Sequence: Synthetic oligonucleotide
ctgtaacaaacctacaaggtgg

SEQ ID NO: 2749 - DNA, 22 bp, Artificial Sequence
  Description of Artificial Sequence: Synthetic oligonucleotide
tgtaacaaacctacaaggtggt

SEQ ID NO: 2750 - DNA, 22 bp, Artificial Sequence
  Description of Artificial Sequence: Synthetic oligonucleotide
gtgtgtctgtaacaaacctaca

SEQ ID NO: 2751 - DNA, 22 bp, Artificial Sequence
  Description of Artificial Sequence: Synthetic oligonucleotide
tgtgtctgtaacaaacctacaa

SEQ ID NO: 2752 - DNA, 22 bp, Artificial Sequence
  Description of Artificial Sequence: Synthetic oligonucleotide
gtgtctgtaacaaacctacaag

SEQ ID NO: 2753 - DNA, 22 bp, Artificial Sequence
  Description of Artificial Sequence: Synthetic oligonucleotide
tgtctgtaacaaacctacaagg

SEQ ID NO: 2754 - DNA, 22 bp, Artificial Sequence
  Description of Artificial Sequence: Synthetic oligonucleotide
aggtgtgtctgtaacaaaccta

SEQ ID NO: 2755 - DNA, 22 bp, Artificial Sequence
  Description of Artificial Sequence: Synthetic oligonucleotide
ggtgtgtctgtaacaaacctac

SEQ ID NO: 2756 - DNA, 22 bp, Artificial Sequence
  Description of Artificial Sequence: Synthetic oligonucleotide
taagctttgtcactacaaggct

SEQ ID NO: 2757 - DNA, 22 bp, Artificial Sequence
  Description of Artificial Sequence: Synthetic oligonucleotide
aagctttgtcactacaaggctg

SEQ ID NO: 2758 - DNA, 22 bp, Artificial Sequence
  Description of Artificial Sequence: Synthetic oligonucleotide
tttgcatagaatgtccaataac

SEQ ID NO: 2759 - DNA, 22 bp, Artificial Sequence
  Description of Artificial Sequence: Synthetic oligonucleotide
gaggtcctttagtaaggtcagt

SEQ ID NO: 2760 - DNA, 22 bp, Artificial Sequence
  Description of Artificial Sequence: Synthetic oligonucleotide
tgaggtcctttagtaaggtcag

SEQ ID NO: 2761 - DNA, 22 bp, Artificial Sequence
  Description of Artificial Sequence: Synthetic oligonucleotide
ggtcctttagtaaggtcagtct

SEQ ID NO: 2762 - DNA, 22 bp, Artificial Sequence
  Description of Artificial Sequence: Synthetic oligonucleotide
aggtcctttagtaaggtcagtc

SEQ ID NO: 2763 - DNA, 22 bp, Artificial Sequence
  Description of Artificial Sequence: Synthetic oligonucleotide
tcatgaggtcctttagtaaggt

SEQ ID NO: 2764 - DNA, 22 bp, Artificial Sequence
  Description of Artificial Sequence: Synthetic oligonucleotide
ttcatgaggtcctttagtaagg

SEQ ID NO: 2765 - DNA, 22 bp, Artificial Sequence
  Description of Artificial Sequence: Synthetic oligonucleotide
atgaggtcctttagtaaggtca

SEQ ID NO: 2766 - DNA, 22 bp, Artificial Sequence
  Description of Artificial Sequence: Synthetic oligonucleotide
catgaggtcctttagtaaggtc

SEQ ID NO: 2767 - DNA, 22 bp, Artificial Sequence
  Description of Artificial Sequence: Synthetic oligonucleotide
aacctgtttgcgcatctgttat

SEQ ID NO: 2768 - DNA, 22 bp, Artificial Sequence
  Description of Artificial Sequence: Synthetic oligonucleotide
tgcatggctgcatcacggtcaa

SEQ ID NO: 2769 - DNA, 22 bp, Artificial Sequence
  Description of Artificial Sequence: Synthetic oligonucleotide
gcatggctgcatcacggtcaaa

SEQ ID NO: 2770 - DNA, 22 bp, Artificial Sequence
  Description of Artificial Sequence: Synthetic oligonucleotide
gcatcacggtcaaattcagatt

SEQ ID NO: 2771 - DNA, 22 bp, Artificial Sequence
  Description of Artificial Sequence: Synthetic oligonucleotide
gcccacatggaaatggcttgat

SEQ ID NO: 2772 - DNA, 22 bp, Artificial Sequence
  Description of Artificial Sequence: Synthetic oligonucleotide
cccacatggaaatggcttgatc

SEQ ID NO: 2773 - DNA, 22 bp, Artificial Sequence
  Description of Artificial Sequence: Synthetic oligonucleotide
ccacatggaaatggcttgatct

SEQ ID NO: 2774 - DNA, 22 bp, Artificial Sequence
  Description of Artificial Sequence: Synthetic oligonucleotide
cacatggaaatggcttgatcta

SEQ ID NO: 2775 - DNA, 22 bp, Artificial Sequence
  Description of Artificial Sequence: Synthetic oligonucleotide
acatggaaatggcttgatctaa

SEQ ID NO: 2776 - DNA, 22 bp, Artificial Sequence
  Description of Artificial Sequence: Synthetic oligonucleotide
catggaaatggcttgatctaaa

SEQ ID NO: 2777 - DNA, 22 bp, Artificial Sequence
  Description of Artificial Sequence: Synthetic oligonucleotide
atggaaatggcttgatctaaag

SEQ ID NO: 2778 - DNA, 22 bp, Artificial Sequence
  Description of Artificial Sequence: Synthetic oligonucleotide
aaaagttagcagcttcaccagc

SEQ ID NO: 2779 - DNA, 22 bp, Artificial Sequence
  Description of Artificial Sequence: Synthetic oligonucleotide
aacagatctacaagagatcgaa

SEQ ID NO: 2780 - DNA, 22 bp, Artificial Sequence
  Description of Artificial Sequence: Synthetic oligonucleotide
atttatcaaaacactctacacg

SEQ ID NO: 2781 - DNA, 22 bp, Artificial Sequence
  Description of Artificial Sequence: Synthetic oligonucleotide
gaatttatcaaaacactctaca

SEQ ID NO: 2782 - DNA, 22 bp, Artificial Sequence
  Description of Artificial Sequence: Synthetic oligonucleotide
aatttatcaaaacactctacac

SEQ ID NO: 2783 - DNA, 22 bp, Artificial Sequence
  Description of Artificial Sequence: Synthetic oligonucleotide
ttgaatttatcaaaacactcta

SEQ ID NO: 2784 - DNA, 22 bp, Artificial Sequence
  Description of Artificial Sequence: Synthetic oligonucleotide
tgaatttatcaaaacactctac

SEQ ID NO: 2785 - DNA, 22 bp, Artificial Sequence
  Description of Artificial Sequence: Synthetic oligonucleotide
ctttgaatttatcaaaacactc

SEQ ID NO: 2786 - DNA, 22 bp, Artificial Sequence
  Description of Artificial Sequence: Synthetic oligonucleotide
tttgaatttatcaaaacactct

SEQ ID NO: 2787 - DNA, 22 bp, Artificial Sequence
  Description of Artificial Sequence: Synthetic oligonucleotide
cactttgaatttatcaaaacac

SEQ ID NO: 2788 - DNA, 22 bp, Artificial Sequence
  Description of Artificial Sequence: Synthetic oligonucleotide
actttgaatttatcaaaacact

SEQ ID NO: 2789 - DNA, 22 bp, Artificial Sequence
  Description of Artificial Sequence: Synthetic oligonucleotide
tcttaactacaaagtaagaatc

SEQ ID NO: 2790 - DNA, 22 bp, Artificial Sequence
  Description of Artificial Sequence: Synthetic oligonucleotide
ctcttaactacaaagtaagaat

SEQ ID NO: 2791 - DNA, 22 bp, Artificial Sequence
  Description of Artificial Sequence: Synthetic oligonucleotide
tgtctcttaactacaaagtaag

SEQ ID NO: 2792 - DNA, 22 bp, Artificial Sequence
  Description of Artificial Sequence: Synthetic oligonucleotide
gtctcttaactacaaagtaaga

SEQ ID NO: 2793 - DNA, 22 bp, Artificial Sequence
  Description of Artificial Sequence: Synthetic oligonucleotide
tgctatgtgagattaaagttaa

SEQ ID NO: 2794 - DNA, 22 bp, Artificial Sequence
  Description of Artificial Sequence: Synthetic oligonucleotide
ttgctatgtgagattaaagtta

SEQ ID NO: 2795 - DNA, 22 bp, Artificial Sequence
  Description of Artificial Sequence: Synthetic oligonucleotide
ctatgtgagattaaagttaact

SEQ ID NO: 2796 - DNA, 22 bp, Artificial Sequence
  Description of Artificial Sequence: Synthetic oligonucleotide
gctatgtgagattaaagttaac

SEQ ID NO: 2797 - DNA, 22 bp, Artificial Sequence
  Description of Artificial Sequence: Synthetic oligonucleotide
atgtgagattaaagttaactac

SEQ ID NO: 2798 - DNA, 22 bp, Artificial Sequence
  Description of Artificial Sequence: Synthetic oligonucleotide
tatgtgagattaaagttaacta

SEQ ID NO: 2799 - DNA, 22 bp, Artificial Sequence
  Description of Artificial Sequence: Synthetic oligonucleotide
tgtgagattaaagttaactaca

SEQ ID NO: 2800 - DNA, 22 bp, Artificial Sequence
  Description of Artificial Sequence: Synthetic oligonucleotide
tttgtgaaaaattaaaaccacc

SEQ ID NO: 2801 - DNA, 22 bp, Artificial Sequence
  Description of Artificial Sequence: Synthetic oligonucleotide
ttaccatcctgagcaaagaaga

SEQ ID NO: 2802 - DNA, 22 bp, Artificial Sequence
  Description of Artificial Sequence: Synthetic oligonucleotide
cctgagcaaagaagaagtgttt

SEQ ID NO: 2803 - DNA, 22 bp, Artificial Sequence
  Description of Artificial Sequence: Synthetic oligonucleotide
tttaattcaacagaacttcctt

SEQ ID NO: 2804 - DNA, 22 bp, Artificial Sequence
  Description of Artificial Sequence: Synthetic oligonucleotide
atcctgagcaaagaagaagtgt

SEQ ID NO: 2805 - DNA, 22 bp, Artificial Sequence
  Description of Artificial Sequence: Synthetic oligonucleotide
tcctgagcaaagaagaagtgtt

SEQ ID NO: 2806 - DNA, 22 bp, Artificial Sequence
  Description of Artificial Sequence: Synthetic oligonucleotide
ccatcctgagcaaagaagaagt

SEQ ID NO: 2807 - DNA, 22 bp, Artificial Sequence
  Description of Artificial Sequence: Synthetic oligonucleotide
catcctgagcaaagaagaagtg

SEQ ID NO: 2808 - DNA, 22 bp, Artificial Sequence
  Description of Artificial Sequence: Synthetic oligonucleotide
taccatcctgagcaaagaagaa

SEQ ID NO: 2809 - DNA, 22 bp, Artificial Sequence
  Description of Artificial Sequence: Synthetic oligonucleotide
accatcctgagcaaagaagaag

SEQ ID NO: 2810 - DNA, 22 bp, Artificial Sequence
  Description of Artificial Sequence: Synthetic oligonucleotide
aaagggagtgaggcttgtatcg

SEQ ID NO: 2811 - DNA, 22 bp, Artificial Sequence
  Description of Artificial Sequence: Synthetic oligonucleotide
agggagtgaggcttgtatcggt

SEQ ID NO: 2812 - DNA, 22 bp, Artificial Sequence
  Description of Artificial Sequence: Synthetic oligonucleotide
ttatgtctacagcaccctgcat

SEQ ID NO: 2813 - DNA, 22 bp, Artificial Sequence
  Description of Artificial Sequence: Synthetic oligonucleotide
tttatgtctacagcaccctgca

SEQ ID NO: 2814 - DNA, 22 bp, Artificial Sequence
  Description of Artificial Sequence: Synthetic oligonucleotide
gaaatcaccgaaatcataccag

SEQ ID NO: 2815 - DNA, 22 bp, Artificial Sequence
  Description of Artificial Sequence: Synthetic oligonucleotide
aaatcaccgaaatcataccagt

SEQ ID NO: 2816 - DNA, 22 bp, Artificial Sequence
  Description of Artificial Sequence: Synthetic oligonucleotide
aggttccacctggtttaacata

SEQ ID NO: 2817 - DNA, 22 bp, Artificial Sequence
  Description of Artificial Sequence: Synthetic oligonucleotide
ggttccacctggtttaacatat

SEQ ID NO: 2818 - DNA, 22 bp, Artificial Sequence
  Description of Artificial Sequence: Synthetic oligonucleotide
cacctggtttaacatatagtga

SEQ ID NO: 2819 - DNA, 22 bp, Artificial Sequence
  Description of Artificial Sequence: Synthetic oligonucleotide
acctggtttaacatatagtgaa

SEQ ID NO: 2820 - DNA, 22 bp, Artificial Sequence
  Description of Artificial Sequence: Synthetic oligonucleotide
cctggtttaacatatagtgaac

SEQ ID NO: 2821 - DNA, 22 bp, Artificial Sequence
  Description of Artificial Sequence: Synthetic oligonucleotide
ctggtttaacatatagtgaacc

SEQ ID NO: 2822 - DNA, 22 bp, Artificial Sequence
  Description of Artificial Sequence: Synthetic oligonucleotide
gttccacctggtttaacatata

SEQ ID NO: 2823 - DNA, 22 bp, Artificial Sequence
  Description of Artificial Sequence: Synthetic oligonucleotide
ttccacctggtttaacatatag

SEQ ID NO: 2824 - DNA, 22 bp, Artificial Sequence
  Description of Artificial Sequence: Synthetic oligonucleotide
tccacctggtttaacatatagt

SEQ ID NO: 2825 - DNA, 22 bp, Artificial Sequence
  Description of Artificial Sequence: Synthetic oligonucleotide
ccacctggtttaacatatagtg

SEQ ID NO: 2826 - DNA, 22 bp, Artificial Sequence
  Description of Artificial Sequence: Synthetic oligonucleotide
gttgaatctgagggtccaccaa

SEQ ID NO: 2827 - DNA, 22 bp, Artificial Sequence
  Description of Artificial Sequence: Synthetic oligonucleotide
agttgaatctgagggtccacca

SEQ ID NO: 2828 - DNA, 22 bp, Artificial Sequence
  Description of Artificial Sequence: Synthetic oligonucleotide
cagttgaatctgagggtccacc

SEQ ID NO: 2829 - DNA, 22 bp, Artificial Sequence
  Description of Artificial Sequence: Synthetic oligonucleotide
gttattagagtaagcaactgaa

SEQ ID NO: 2830 - DNA, 22 bp, Artificial Sequence
  Description of Artificial Sequence: Synthetic oligonucleotide
cctcttgtcctcagatctagcc

SEQ ID NO: 2831 - DNA, 22 bp, Artificial Sequence
  Description of Artificial Sequence: Synthetic oligonucleotide
ctcttgtcctcagatctagcct

SEQ ID NO: 2832 - DNA, 22 bp, Artificial Sequence
  Description of Artificial Sequence: Synthetic oligonucleotide
tcttgtcctcagatctagcctg

SEQ ID NO: 2833 - DNA, 22 bp, Artificial Sequence
  Description of Artificial Sequence: Synthetic oligonucleotide
cttgtcctcagatctagcctgt

SEQ ID NO: 2834 - DNA, 22 bp, Artificial Sequence
  Description of Artificial Sequence: Synthetic oligonucleotide
ttgccctcttgtcctcagatct

SEQ ID NO: 2835 - DNA, 22 bp, Artificial Sequence
  Description of Artificial Sequence: Synthetic oligonucleotide
tgccctcttgtcctcagatcta

SEQ ID NO: 2836 - DNA, 22 bp, Artificial Sequence
  Description of Artificial Sequence: Synthetic oligonucleotide
gccctcttgtcctcagatctag

SEQ ID NO: 2837 - DNA, 22 bp, Artificial Sequence
  Description of Artificial Sequence: Synthetic oligonucleotide
ccctcttgtcctcagatctagc

SEQ ID NO: 2838 - DNA, 22 bp, Artificial Sequence
  Description of Artificial Sequence: Synthetic oligonucleotide
tttgccctcttgtcctcagatc

SEQ ID NO: 2839 - DNA, 22 bp, Artificial Sequence
  Description of Artificial Sequence: Synthetic oligonucleotide
aaagaagtacgctattaactat

SEQ ID NO: 2840 - DNA, 22 bp, Artificial Sequence
  Description of Artificial Sequence: Synthetic oligonucleotide
aaaagaagtacgctattaacta

SEQ ID NO: 2841 - DNA, 22 bp, Artificial Sequence
  Description of Artificial Sequence: Synthetic oligonucleotide
agaagtacgctattaactatta

SEQ ID NO: 2842 - DNA, 22 bp, Artificial Sequence
  Description of Artificial Sequence: Synthetic oligonucleotide
aagaagtacgctattaactatt

SEQ ID NO: 2843 - DNA, 22 bp, Artificial Sequence
  Description of Artificial Sequence: Synthetic oligonucleotide
aagtacgctattaactattaac

SEQ ID NO: 2844 - DNA, 22 bp, Artificial Sequence
  Description of Artificial Sequence: Synthetic oligonucleotide
gaagtacgctattaactattaa

SEQ ID NO: 2845 - DNA, 22 bp, Artificial Sequence
  Description of Artificial Sequence: Synthetic oligonucleotide
gtacgctattaactattaacgt

SEQ ID NO: 2846 - DNA, 22 bp, Artificial Sequence
  Description of Artificial Sequence: Synthetic oligonucleotide
agtacgctattaactattaacg

SEQ ID NO: 2847 - DNA, 22 bp, Artificial Sequence
  Description of Artificial Sequence: Synthetic oligonucleotide
acgctattaactattaacgtac

SEQ ID NO: 2848 - DNA, 22 bp, Artificial Sequence
  Description of Artificial Sequence: Synthetic oligonucleotide
tacgctattaactattaacgta

SEQ ID NO: 2849 - DNA, 22 bp, Artificial Sequence
  Description of Artificial Sequence: Synthetic oligonucleotide
aagcagaaaaagatgccaaaat

SEQ ID NO: 2850 - DNA, 22 bp, Artificial Sequence
  Description of Artificial Sequence: Synthetic oligonucleotide
acgagaagaggcttgactgccg

SEQ ID NO: 2851 - DNA, 22 bp, Artificial Sequence
  Description of Artificial Sequence: Synthetic oligonucleotide
cgagaagaggcttgactgccgc

SEQ ID NO: 2852 - DNA, 22 bp, Artificial Sequence
  Description of Artificial Sequence: Synthetic oligonucleotide
gagaagaggcttgactgccgcc

SEQ ID NO: 2853 - DNA, 22 bp, Artificial Sequence
  Description of Artificial Sequence: Synthetic oligonucleotide
agaagaggcttgactgccgcct

SEQ ID NO: 2854 - DNA, 22 bp, Artificial Sequence
  Description of Artificial Sequence: Synthetic oligonucleotide
aggaacgagaagaggcttgact

SEQ ID NO: 2855 - DNA, 22 bp, Artificial Sequence
  Description of Artificial Sequence: Synthetic oligonucleotide
ggaacgagaagaggcttgactg

SEQ ID NO: 2856 - DNA, 22 bp, Artificial Sequence
  Description of Artificial Sequence: Synthetic oligonucleotide
gaacgagaagaggcttgactgc

SEQ ID NO: 2857 - DNA, 22 bp, Artificial Sequence
  Description of Artificial Sequence: Synthetic oligonucleotide
aacgagaagaggcttgactgcc

SEQ ID NO: 2858 - DNA, 22 bp, Artificial Sequence
  Description of Artificial Sequence: Synthetic oligonucleotide
tgaggaacgagaagaggcttga

SEQ ID NO: 2859 - DNA, 22 bp, Artificial Sequence
  Description of Artificial Sequence: Synthetic oligonucleotide
gaggaacgagaagaggcttgac

SEQ ID NO: 2860 - DNA, 22 bp, Artificial Sequence
  Description of Artificial Sequence: Synthetic oligonucleotide
cttgggtttgttctggaccacg

SEQ ID NO: 2861 - DNA, 22 bp, Artificial Sequence
  Description of Artificial Sequence: Synthetic oligonucleotide
ttgggtttgttctggaccacgt

SEQ ID NO: 2862 - DNA, 22 bp, Artificial Sequence
  Description of Artificial Sequence: Synthetic oligonucleotide
tccttgggtttgttctggacca

SEQ ID NO: 2863 - DNA, 22 bp, Artificial Sequence
  Description of Artificial Sequence: Synthetic oligonucleotide
ccttgggtttgttctggaccac

SEQ ID NO: 2864 - DNA, 22 bp, Artificial Sequence
  Description of Artificial Sequence: Synthetic oligonucleotide
ggtttgttctggaccacgtctg

SEQ ID NO: 2865 - DNA, 22 bp, Artificial Sequence
  Description of Artificial Sequence: Synthetic oligonucleotide
gtttgttctggaccacgtctgc

SEQ ID NO: 2866 - DNA, 22 bp, Artificial Sequence
  Description of Artificial Sequence: Synthetic oligonucleotide
tgggtttgttctggaccacgtc

SEQ ID NO: 2867 - DNA, 22 bp, Artificial Sequence
  Description of Artificial Sequence: Synthetic oligonucleotide
gggtttgttctggaccacgtct

SEQ ID NO: 2868 - DNA, 22 bp, Artificial Sequence
  Description of Artificial Sequence: Synthetic oligonucleotide
tttccttgggtttgttctggac

SEQ ID NO: 2869 - DNA, 22 bp, Artificial Sequence
  Description of Artificial Sequence: Synthetic oligonucleotide
ttccttgggtttgttctggacc

SEQ ID NO: 2870 - DNA, 22 bp, Artificial Sequence
  Description of Artificial Sequence: Synthetic oligonucleotide
acatgtacctacccagaaaact

SEQ ID NO: 2871 - DNA, 22 bp, Artificial Sequence
  Description of Artificial Sequence: Synthetic oligonucleotide
gacatgtacctacccagaaaac

SEQ ID NO: 2872 - DNA, 22 bp, Artificial Sequence
  Description of Artificial Sequence: Synthetic oligonucleotide
gtgtacatagcctcataaaact

SEQ ID NO: 2873 - DNA, 22 bp, Artificial Sequence
  Description of Artificial Sequence: Synthetic oligonucleotide
tgtacatagcctcataaaactc

SEQ ID NO: 2874 - DNA, 22 bp, Artificial Sequence
  Description of Artificial Sequence: Synthetic oligonucleotide
gtgtgtacatagcctcataaaa

SEQ ID NO: 2875 - DNA, 22 bp, Artificial Sequence
  Description of Artificial Sequence: Synthetic oligonucleotide
tgtgtacatagcctcataaaac

SEQ ID NO: 2876 - DNA, 22 bp, Artificial Sequence
  Description of Artificial Sequence: Synthetic oligonucleotide
cggtgtgtacatagcctcataa

SEQ ID NO: 2877 - DNA, 22 bp, Artificial Sequence
  Description of Artificial Sequence: Synthetic oligonucleotide
ggtgtgtacatagcctcataaa

SEQ ID NO: 2878 - DNA, 22 bp, Artificial Sequence
  Description of Artificial Sequence: Synthetic oligonucleotide
tgcggtgtgtacatagcctcat

SEQ ID NO: 2879 - DNA, 22 bp, Artificial Sequence
  Description of Artificial Sequence: Synthetic oligonucleotide
gcggtgtgtacatagcctcata

SEQ ID NO: 2880 - DNA, 22 bp, Artificial Sequence
  Description of Artificial Sequence: Synthetic oligonucleotide
tatgcggtgtgtacatagcctc

SEQ ID NO: 2881 - DNA, 22 bp, Artificial Sequence
  Description of Artificial Sequence: Synthetic oligonucleotide
atgcggtgtgtacatagcctca

SEQ ID NO: 2882 - DNA, 22 bp, Artificial Sequence
  Description of Artificial Sequence: Synthetic oligonucleotide
agttcgtttatgtgtaatgtaa

SEQ ID NO: 2883 - DNA, 22 bp, Artificial Sequence
  Description of Artificial Sequence: Synthetic oligonucleotide
gttcgtttatgtgtaatgtaat

SEQ ID NO: 2884 - DNA, 22 bp, Artificial Sequence
  Description of Artificial Sequence: Synthetic oligonucleotide
cgtttatgtgtaatgtaatttg

SEQ ID NO: 2885 - DNA, 22 bp, Artificial Sequence
  Description of Artificial Sequence: Synthetic oligonucleotide
gtttatgtgtaatgtaatttga

SEQ ID NO: 2886 - DNA, 22 bp, Artificial Sequence
  Description of Artificial Sequence: Synthetic oligonucleotide
ttcgtttatgtgtaatgtaatt

SEQ ID NO: 2887 - DNA, 22 bp, Artificial Sequence
  Description of Artificial Sequence: Synthetic oligonucleotide
tcgtttatgtgtaatgtaattt

SEQ ID NO: 2888 - DNA, 22 bp, Artificial Sequence
  Description of Artificial Sequence: Synthetic oligonucleotide
tatgtgtaatgtaatttgactc

SEQ ID NO: 2889 - DNA, 22 bp, Artificial Sequence
  Description of Artificial Sequence: Synthetic oligonucleotide
atgtgtaatgtaatttgactcc

SEQ ID NO: 2890 - DNA, 22 bp, Artificial Sequence
  Description of Artificial Sequence: Synthetic oligonucleotide
tttatgtgtaatgtaatttgac

SEQ ID NO: 2891 - DNA, 22 bp, Artificial Sequence
  Description of Artificial Sequence: Synthetic oligonucleotide
ttatgtgtaatgtaatttgact

SEQ ID NO: 2892 - DNA, 22 bp, Artificial Sequence
  Description of Artificial Sequence: Synthetic oligonucleotide
ccgaaacgaatgagtacataag

SEQ ID NO: 2893 - DNA, 22 bp, Artificial Sequence
  Description of Artificial Sequence: Synthetic oligonucleotide
cgaaacgaatgagtacataagt

SEQ ID NO: 2894 - DNA, 22 bp, Artificial Sequence
  Description of Artificial Sequence: Synthetic oligonucleotide
aatgagtacataagttcgtact

SEQ ID NO: 2895 - DNA, 22 bp, Artificial Sequence
  Description of Artificial Sequence: Synthetic oligonucleotide
atgagtacataagttcgtactc

SEQ ID NO: 2896 - DNA, 22 bp, Artificial Sequence
  Description of Artificial Sequence: Synthetic oligonucleotide
cgaatgagtacataagttcgta

SEQ ID NO: 2897 - DNA, 22 bp, Artificial Sequence
  Description of Artificial Sequence: Synthetic oligonucleotide
gaatgagtacataagttcgtac

SEQ ID NO: 2898 - DNA, 22 bp, Artificial Sequence
  Description of Artificial Sequence: Synthetic oligonucleotide
aacgaatgagtacataagttcg

SEQ ID NO: 2899 - DNA, 22 bp, Artificial Sequence
  Description of Artificial Sequence: Synthetic oligonucleotide
acgaatgagtacataagttcgt

SEQ ID NO: 2900 - DNA, 22 bp, Artificial Sequence
  Description of Artificial Sequence: Synthetic oligonucleotide
gaaacgaatgagtacataagtt

SEQ ID NO: 2901 - DNA, 22 bp, Artificial Sequence
  Description of Artificial Sequence: Synthetic oligonucleotide
aaacgaatgagtacataagttc

SEQ ID NO: 2902 - DNA, 22 bp, Artificial Sequence
  Description of Artificial Sequence: Synthetic oligonucleotide
ggccaatgtttgtaatcagttc

SEQ ID NO: 2903 - DNA, 22 bp, Artificial Sequence
  Description of Artificial Sequence: Synthetic oligonucleotide
cggccaatgtttgtaatcagtt

SEQ ID NO: 2904 - DNA, 22 bp, Artificial Sequence
  Description of Artificial Sequence: Synthetic oligonucleotide
gcggccaatgtttgtaatcagt

SEQ ID NO: 2905 - DNA, 22 bp, Artificial Sequence
  Description of Artificial Sequence: Synthetic oligonucleotide
tgcggccaatgtttgtaatcag

SEQ ID NO: 2906 - DNA, 22 bp, Artificial Sequence
  Description of Artificial Sequence: Synthetic oligonucleotide
ttgcggccaatgtttgtaatca

SEQ ID NO: 2907 - DNA, 22 bp, Artificial Sequence
  Description of Artificial Sequence: Synthetic oligonucleotide
tttgcggccaatgtttgtaatc

SEQ ID NO: 2908 - DNA, 22 bp, Artificial Sequence
  Description of Artificial Sequence: Synthetic oligonucleotide
atttgcggccaatgtttgtaat

SEQ ID NO: 2909 - DNA, 22 bp, Artificial Sequence
  Description of Artificial Sequence: Synthetic oligonucleotide
aatttgcggccaatgtttgtaa

SEQ ID NO: 2910 - DNA, 22 bp, Artificial Sequence
  Description of Artificial Sequence: Synthetic oligonucleotide
caatttgcggccaatgtttgta

SEQ ID NO: 2911 - DNA, 22 bp, Artificial Sequence
  Description of Artificial Sequence: Synthetic oligonucleotide
gcaatttgcggccaatgtttgt

SEQ ID NO: 2912 - DNA, 22 bp, Artificial Sequence
  Description of Artificial Sequence: Synthetic oligonucleotide
taaacaacagcatcaccatagt

SEQ ID NO: 2913 - DNA, 22 bp, Artificial Sequence
  Description of Artificial Sequence: Synthetic oligonucleotide
aacaacagcatcaccatagtca

SEQ ID NO: 2914 - DNA, 22 bp, Artificial Sequence
  Description of Artificial Sequence: Synthetic oligonucleotide
tcatcactaataaatgtactac

SEQ ID NO: 2915 - DNA, 22 bp, Artificial Sequence
  Description of Artificial Sequence: Synthetic oligonucleotide
ttcatcactaataaatgtacta

SEQ ID NO: 2916 - DNA, 22 bp, Artificial Sequence
  Description of Artificial Sequence: Synthetic oligonucleotide
atcactaataaatgtactacca

SEQ ID NO: 2917 - DNA, 22 bp, Artificial Sequence
  Description of Artificial Sequence: Synthetic oligonucleotide
catcactaataaatgtactacc

SEQ ID NO: 2918 - DNA, 22 bp, Artificial Sequence
  Description of Artificial Sequence: Synthetic oligonucleotide
tcactaataaatgtactaccag

SEQ ID NO: 2919 - DNA, 22 bp, Artificial Sequence
  Description of Artificial Sequence: Synthetic oligonucleotide
aggtataattctactacattta

SEQ ID NO: 2920 - DNA, 22 bp, Artificial Sequence
  Description of Artificial Sequence: Synthetic oligonucleotide
aacaggcaaactgagttggacg

SEQ ID NO: 2921 - DNA, 22 bp, Artificial Sequence
  Description of Artificial Sequence: Synthetic oligonucleotide
acaggcaaactgagttggacgt

SEQ ID NO: 2922 - DNA, 22 bp, Artificial Sequence
  Description of Artificial Sequence: Synthetic oligonucleotide
caggcaaactgagttggacgtg

SEQ ID NO: 2923 - DNA, 22 bp, Artificial Sequence
  Description of Artificial Sequence: Synthetic oligonucleotide
gtttgatgaacacatagggctg

SEQ ID NO: 2924 - DNA, 22 bp, Artificial Sequence
  Description of Artificial Sequence: Synthetic oligonucleotide
tttgatgaacacatagggctgt

SEQ ID NO: 2925 - DNA, 22 bp, Artificial Sequence
  Description of Artificial Sequence: Synthetic oligonucleotide
aacacatagggctgttcaagtt

SEQ ID NO: 2926 - DNA, 22 bp, Artificial Sequence
  Description of Artificial Sequence: Synthetic oligonucleotide
acacatagggctgttcaagttg

SEQ ID NO: 2927 - DNA, 22 bp, Artificial Sequence
  Description of Artificial Sequence: Synthetic oligonucleotide
tgaacacatagggctgttcaag

SEQ ID NO: 2928 - DNA, 22 bp, Artificial Sequence
  Description of Artificial Sequence: Synthetic oligonucleotide
gaacacatagggctgttcaagt

SEQ ID NO: 2929 - DNA, 22 bp, Artificial Sequence
  Description of Artificial Sequence: Synthetic oligonucleotide
gatgaacacatagggctgttca

SEQ ID NO: 2930 - DNA, 22 bp, Artificial Sequence
  Description of Artificial Sequence: Synthetic oligonucleotide
atgaacacatagggctgttcaa

SEQ ID NO: 2931 - DNA, 22 bp, Artificial Sequence
  Description of Artificial Sequence: Synthetic oligonucleotide
ttgatgaacacatagggctgtt

SEQ ID NO: 2932 - DNA, 22 bp, Artificial Sequence
  Description of Artificial Sequence: Synthetic oligonucleotide
tgatgaacacatagggctgttc

SEQ ID NO: 2933 - DNA, 22 bp, Artificial Sequence
  Description of Artificial Sequence: Synthetic oligonucleotide
aaggtctctatcagacattatg

SEQ ID NO: 2934 - DNA, 22 bp, Artificial Sequence
  Description of Artificial Sequence: Synthetic oligonucleotide
aggtctctatcagacattatgc

SEQ ID NO: 2935 - DNA, 22 bp, Artificial Sequence
  Description of Artificial Sequence: Synthetic oligonucleotide
taaaggtctctatcagacatta

SEQ ID NO: 2936 - DNA, 22 bp, Artificial Sequence
  Description of Artificial Sequence: Synthetic oligonucleotide
aaaggtctctatcagacattat

SEQ ID NO: 2937 - DNA, 22 bp, Artificial Sequence
  Description of Artificial Sequence: Synthetic oligonucleotide
tctctatcagacattatgcaaa

SEQ ID NO: 2938 - DNA, 22 bp, Artificial Sequence
  Description of Artificial Sequence: Synthetic oligonucleotide
ggtctctatcagacattatgca

SEQ ID NO: 2939 - DNA, 22 bp, Artificial Sequence
  Description of Artificial Sequence: Synthetic oligonucleotide
cataaaggtctctatcagacat

SEQ ID NO: 2940 - DNA, 22 bp, Artificial Sequence
  Description of Artificial Sequence: Synthetic oligonucleotide
ataaaggtctctatcagacatt

SEQ ID NO: 2941 - DNA, 22 bp, Artificial Sequence
  Description of Artificial Sequence: Synthetic oligonucleotide
atagtagttgtctgatatcaca

SEQ ID NO: 2942 - DNA, 22 bp, Artificial Sequence
  Description of Artificial Sequence: Synthetic oligonucleotide
tagtagttgtctgatatcacac

SEQ ID NO: 2943 - DNA, 22 bp, Artificial Sequence
  Description of Artificial Sequence: Synthetic oligonucleotide
gttgtctgatatcacacattgt

SEQ ID NO: 2944 - DNA, 22 bp, Artificial Sequence
  Description of Artificial Sequence: Synthetic oligonucleotide
tgtctgatatcacacattgttg

SEQ ID NO: 2945 - DNA, 22 bp, Artificial Sequence
  Description of Artificial Sequence: Synthetic oligonucleotide
gtctgatatcacacattgttgg

SEQ ID NO: 2946 - DNA, 22 bp, Artificial Sequence
  Description of Artificial Sequence: Synthetic oligonucleotide
agtagttgtctgatatcacaca

SEQ ID NO: 2947 - DNA, 22 bp, Artificial Sequence
  Description of Artificial Sequence: Synthetic oligonucleotide
gtagttgtctgatatcacacat

SEQ ID NO: 2948 - DNA, 22 bp, Artificial Sequence
  Description of Artificial Sequence: Synthetic oligonucleotide
tagttgtctgatatcacacatt

SEQ ID NO: 2949 - DNA, 22 bp, Artificial Sequence
  Description of Artificial Sequence: Synthetic oligonucleotide
agttgtctgatatcacacattg

SEQ ID NO: 2950 - DNA, 22 bp, Artificial Sequence
  Description of Artificial Sequence: Synthetic oligonucleotide
acatcacaacctggagcattgc

SEQ ID NO: 2951 - DNA, 22 bp, Artificial Sequence
  Description of Artificial Sequence: Synthetic oligonucleotide
gacatcacaacctggagcattg

SEQ ID NO: 2952 - DNA, 22 bp, Artificial Sequence
  Description of Artificial Sequence: Synthetic oligonucleotide
tgacatcacaacctggagcatt

SEQ ID NO: 2953 - DNA, 22 bp, Artificial Sequence
  Description of Artificial Sequence: Synthetic oligonucleotide
cctgtttgcgcatctgttatga

SEQ ID NO: 2954 - DNA, 22 bp, Artificial Sequence
  Description of Artificial Sequence: Synthetic oligonucleotide
ctgtttgcgcatctgttatgaa

SEQ ID NO: 2955 - DNA, 22 bp, Artificial Sequence
  Description of Artificial Sequence: Synthetic oligonucleotide
tgtttgcgcatctgttatgaaa

SEQ ID NO: 2956 - DNA, 22 bp, Artificial Sequence
  Description of Artificial Sequence: Synthetic oligonucleotide
gtttgcgcatctgttatgaaat

SEQ ID NO: 2957 - DNA, 22 bp, Artificial Sequence
  Description of Artificial Sequence: Synthetic oligonucleotide
gtgacatcacaacctggagcat

SEQ ID NO: 2958 - DNA, 22 bp, Artificial Sequence
  Description of Artificial Sequence: Synthetic oligonucleotide
gcatcacccaactagcaggcat

SEQ ID NO: 2959 - DNA, 22 bp, Artificial Sequence
  Description of Artificial Sequence: Synthetic oligonucleotide
acgcatcacccaactagcaggc

SEQ ID NO: 2960 - DNA, 22 bp, Artificial Sequence
  Description of Artificial Sequence: Synthetic oligonucleotide
cgcatcacccaactagcaggca

SEQ ID NO: 2961 - DNA, 22 bp, Artificial Sequence
  Description of Artificial Sequence: Synthetic oligonucleotide
atacgcatcacccaactagcag

SEQ ID NO: 2962 - DNA, 22 bp, Artificial Sequence
  Description of Artificial Sequence: Synthetic oligonucleotide
tacgcatcacccaactagcagg

SEQ ID NO: 2963 - DNA, 22 bp, Artificial Sequence
  Description of Artificial Sequence: Synthetic oligonucleotide
ggtaaacaccagatggtgaacc

SEQ ID NO: 2964 - DNA, 22 bp, Artificial Sequence
  Description of Artificial Sequence: Synthetic oligonucleotide
taaacaccagatggtgaaccat

SEQ ID NO: 2965 - DNA, 22 bp, Artificial Sequence
  Description of Artificial Sequence: Synthetic oligonucleotide
gtaaacaccagatggtgaacca

SEQ ID NO: 2966 - DNA, 22 bp, Artificial Sequence
  Description of Artificial Sequence: Synthetic oligonucleotide
aacaccagatggtgaaccattg

SEQ ID NO: 2967 - DNA, 22 bp, Artificial Sequence
  Description of Artificial Sequence: Synthetic oligonucleotide
aaacaccagatggtgaaccatt

SEQ ID NO: 2968 - DNA, 22 bp, Artificial Sequence
  Description of Artificial Sequence: Synthetic oligonucleotide
caccagatggtgaaccattgta

SEQ ID NO: 2969 - DNA, 22 bp, Artificial Sequence
  Description of Artificial Sequence: Synthetic oligonucleotide
acaccagatggtgaaccattgt

SEQ ID NO: 2970 - DNA, 22 bp, Artificial Sequence
  Description of Artificial Sequence: Synthetic oligonucleotide
ccagatggtgaaccattgtaac

SEQ ID NO: 2971 - DNA, 22 bp, Artificial Sequence
  Description of Artificial Sequence: Synthetic oligonucleotide
accagatggtgaaccattgtaa

SEQ ID NO: 2972 - DNA, 22 bp, Artificial Sequence
  Description of Artificial Sequence: Synthetic oligonucleotide
ttctcactagtggtccaaaact

SEQ ID NO: 2973 - DNA, 22 bp, Artificial Sequence
  Description of Artificial Sequence: Synthetic oligonucleotide
tttctcactagtggtccaaaac

SEQ ID NO: 2974 - DNA, 22 bp, Artificial Sequence
  Description of Artificial Sequence: Synthetic oligonucleotide
actcacagtgtcaacaatttca

SEQ ID NO: 2975 - DNA, 22 bp, Artificial Sequence
  Description of Artificial Sequence: Synthetic oligonucleotide
cactcacagtgtcaacaatttc

SEQ ID NO: 2976 - DNA, 22 bp, Artificial Sequence
  Description of Artificial Sequence: Synthetic oligonucleotide
cagcaggaagaagagtcacagt

SEQ ID NO: 2977 - DNA, 22 bp, Artificial Sequence
  Description of Artificial Sequence: Synthetic oligonucleotide
gcagcaggaagaagagtcacag

SEQ ID NO: 2978 - DNA, 22 bp, Artificial Sequence
  Description of Artificial Sequence: Synthetic oligonucleotide
gtagtgcgtttatctagtaata

SEQ ID NO: 2979 - DNA, 22 bp, Artificial Sequence
  Description of Artificial Sequence: Synthetic oligonucleotide
acacccggttgccacgcttgac

SEQ ID NO: 2980 - DNA, 22 bp, Artificial Sequence
  Description of Artificial Sequence: Synthetic oligonucleotide
aacacccggttgccacgcttga

SEQ ID NO: 2981 - DNA, 22 bp, Artificial Sequence
  Description of Artificial Sequence: Synthetic oligonucleotide
cacccggttgccacgcttgact

SEQ ID NO: 2982 - DNA, 22 bp, Artificial Sequence
  Description of Artificial Sequence: Synthetic oligonucleotide
aaaaacagcaagaagtgcaacg

SEQ ID NO: 2983 - DNA, 22 bp, Artificial Sequence
  Description of Artificial Sequence: Synthetic oligonucleotide
aacagcaagaagtgcaacgcca

SEQ ID NO: 2984 - DNA, 22 bp, Artificial Sequence
  Description of Artificial Sequence: Synthetic oligonucleotide
acagcaagaagtgcaacgccaa

SEQ ID NO: 2985 - DNA, 22 bp, Artificial Sequence
  Description of Artificial Sequence: Synthetic oligonucleotide
tgtggtggttggtaaagaacat

SEQ ID NO: 2986 - DNA, 22 bp, Artificial Sequence
  Description of Artificial Sequence: Synthetic oligonucleotide
tgctcatgttcacggcagcagt

SEQ ID NO: 2987 - DNA, 22 bp, Artificial Sequence
  Description of Artificial Sequence: Synthetic oligonucleotide
atgctcatgttcacggcagcag

SEQ ID NO: 2988 - DNA, 22 bp, Artificial Sequence
  Description of Artificial Sequence: Synthetic oligonucleotide
catgctcatgttcacggcagca

SEQ ID NO: 2989 - DNA, 22 bp, Artificial Sequence
  Description of Artificial Sequence: Synthetic oligonucleotide
tcatgctcatgttcacggcagc

SEQ ID NO: 2990 - DNA, 22 bp, Artificial Sequence
  Description of Artificial Sequence: Synthetic oligonucleotide
gctcatgttcacggcagcagta

SEQ ID NO: 2991 - DNA, 22 bp, Artificial Sequence
  Description of Artificial Sequence: Synthetic oligonucleotide
ttcatgctcatgttcacggcag

SEQ ID NO: 2992 - DNA, 22 bp, Artificial Sequence
  Description of Artificial Sequence: Synthetic oligonucleotide
tttcatgctcatgttcacggca

SEQ ID NO: 2993 - DNA, 22 bp, Artificial Sequence
  Description of Artificial Sequence: Synthetic oligonucleotide
taagtatcaaattgtttgtaaa

SEQ ID NO: 2994 - DNA, 22 bp, Artificial Sequence
  Description of Artificial Sequence: Synthetic oligonucleotide
aagtatcaaattgtttgtaaac

SEQ ID NO: 2995 - DNA, 22 bp, Artificial Sequence
  Description of Artificial Sequence: Synthetic oligonucleotide
tataagtatcaaattgtttgta

SEQ ID NO: 2996 - DNA, 22 bp, Artificial Sequence
  Description of Artificial Sequence: Synthetic oligonucleotide
ataagtatcaaattgtttgtaa

SEQ ID NO: 2997 - DNA, 22 bp, Artificial Sequence
  Description of Artificial Sequence: Synthetic oligonucleotide
tatcaaattgtttgtaaaccca

SEQ ID NO: 2998 - DNA, 22 bp, Artificial Sequence
  Description of Artificial Sequence: Synthetic oligonucleotide
agtatcaaattgtttgtaaacc

SEQ ID NO: 2999 - DNA, 22 bp, Artificial Sequence
  Description of Artificial Sequence: Synthetic oligonucleotide
gtatcaaattgtttgtaaaccc

SEQ ID NO: 3000 - DNA, 22 bp, Artificial Sequence
  Description of Artificial Sequence: Synthetic oligonucleotide
gttataagtatcaaattgtttg

SEQ ID NO: 3001 - DNA, 22 bp, Artificial Sequence
  Description of Artificial Sequence: Synthetic oligonucleotide
ttataagtatcaaattgtttgt

SEQ ID NO: 3002 - DNA, 22 bp, Artificial Sequence
  Description of Artificial Sequence: Synthetic oligonucleotide
gtggcggctattgatttcaata

SEQ ID NO: 3003 - DNA, 22 bp, Artificial Sequence
  Description of Artificial Sequence: Synthetic oligonucleotide
agtggcggctattgatttcaat

SEQ ID NO: 3004 - DNA, 22 bp, Artificial Sequence
  Description of Artificial Sequence: Synthetic oligonucleotide
tagtggcggctattgatttcaa

SEQ ID NO: 3005 - DNA, 22 bp, Artificial Sequence
  Description of Artificial Sequence: Synthetic oligonucleotide
ctagtggcggctattgatttca

SEQ ID NO: 3006 - DNA, 22 bp, Artificial Sequence
  Description of Artificial Sequence: Synthetic oligonucleotide
cggctattgatttcaataattt

SEQ ID NO: 3007 - DNA, 22 bp, Artificial Sequence
  Description of Artificial Sequence: Synthetic oligonucleotide
gcggctattgatttcaataatt

SEQ ID NO: 3008 - DNA, 22 bp, Artificial Sequence
  Description of Artificial Sequence: Synthetic oligonucleotide
ggcggctattgatttcaataat

SEQ ID NO: 3009 - DNA, 22 bp, Artificial Sequence
  Description of Artificial Sequence: Synthetic oligonucleotide
tggcggctattgatttcaataa

SEQ ID NO: 3010 - DNA, 22 bp, Artificial Sequence
  Description of Artificial Sequence: Synthetic oligonucleotide
tctagtggcggctattgatttc

SEQ ID NO: 3011 - DNA, 22 bp, Artificial Sequence
  Description of Artificial Sequence: Synthetic oligonucleotide
ctctagtggcggctattgattt

SEQ ID NO: 3012 - DNA, 22 bp, Artificial Sequence
  Description of Artificial Sequence: Synthetic oligonucleotide
tagcacaagttgtaggtatttg

SEQ ID NO: 3013 - DNA, 22 bp, Artificial Sequence
  Description of Artificial Sequence: Synthetic oligonucleotide
caagacgcagtattattgggta

SEQ ID NO: 3014 - DNA, 22 bp, Artificial Sequence
  Description of Artificial Sequence: Synthetic oligonucleotide
ccaagacgcagtattattgggt

SEQ ID NO: 3015 - DNA, 22 bp, Artificial Sequence
  Description of Artificial Sequence: Synthetic oligonucleotide
cacaacctggagcattgcaaac

SEQ ID NO: 3016 - DNA, 22 bp, Artificial Sequence
  Description of Artificial Sequence: Synthetic oligonucleotide
aagtaatcataaacaccaagag

SEQ ID NO: 3017 - DNA, 22 bp, Artificial Sequence
  Description of Artificial Sequence: Synthetic oligonucleotide
agtaatcataaacaccaagagt

SEQ ID NO: 3018 - DNA, 22 bp, Artificial Sequence
  Description of Artificial Sequence: Synthetic oligonucleotide
cacgataaccagtaaagacata

SEQ ID NO: 3019 - DNA, 22 bp, Artificial Sequence
  Description of Artificial Sequence: Synthetic oligonucleotide
taaccagtaaagacataatttc

SEQ ID NO: 3020 - DNA, 22 bp, Artificial Sequence
  Description of Artificial Sequence: Synthetic oligonucleotide
gataaccagtaaagacataatt

SEQ ID NO: 3021 - DNA, 22 bp, Artificial Sequence
  Description of Artificial Sequence: Synthetic oligonucleotide
caagtttgtaatattaggaaat

SEQ ID NO: 3022 - DNA, 22 bp, Artificial Sequence
  Description of Artificial Sequence: Synthetic oligonucleotide
aagtttgtaatattaggaaatc

SEQ ID NO: 3023 - DNA, 22 bp, Artificial Sequence
  Description of Artificial Sequence: Synthetic oligonucleotide
cacaagtttgtaatattaggaa

SEQ ID NO: 3024 - DNA, 22 bp, Artificial Sequence
  Description of Artificial Sequence: Synthetic oligonucleotide
acaagtttgtaatattaggaaa

SEQ ID NO: 3025 - DNA, 22 bp, Artificial Sequence
  Description of Artificial Sequence: Synthetic oligonucleotide
ggcacaagtttgtaatattagg

SEQ ID NO: 3026 - DNA, 22 bp, Artificial Sequence
  Description of Artificial Sequence: Synthetic oligonucleotide
agggcacaagtttgtaatatta

SEQ ID NO: 3027 - DNA, 22 bp, Artificial Sequence
  Description of Artificial Sequence: Synthetic oligonucleotide
gggcacaagtttgtaatattag

SEQ ID NO: 3028 - DNA, 22 bp, Artificial Sequence
  Description of Artificial Sequence: Synthetic oligonucleotide
aaagggcacaagtttgtaatat

SEQ ID NO: 3029 - DNA, 22 bp, Artificial Sequence
  Description of Artificial Sequence: Synthetic oligonucleotide
aagggcacaagtttgtaatatt

SEQ ID NO: 3030 - DNA, 22 bp, Artificial Sequence
  Description of Artificial Sequence: Synthetic oligonucleotide
caggacaacgccgacaagttcc

SEQ ID NO: 3031 - DNA, 22 bp, Artificial Sequence
  Description of Artificial Sequence: Synthetic oligonucleotide
gcaggacaacgccgacaagttc

SEQ ID NO: 3032 - DNA, 22 bp, Artificial Sequence
  Description of Artificial Sequence: Synthetic oligonucleotide
agcaggacaacgccgacaagtt

SEQ ID NO: 3033 - DNA, 22 bp, Artificial Sequence
  Description of Artificial Sequence: Synthetic oligonucleotide
cagcaggacaacgccgacaagt

SEQ ID NO: 3034 - DNA, 22 bp, Artificial Sequence
  Description of Artificial Sequence: Synthetic oligonucleotide
tcagcaggacaacgccgacaag

SEQ ID NO: 3035 - DNA, 22 bp, Artificial Sequence
  Description of Artificial Sequence: Synthetic oligonucleotide
tagaccagaagatcaggaactc

SEQ ID NO: 3036 - DNA, 22 bp, Artificial Sequence
  Description of Artificial Sequence: Synthetic oligonucleotide
ttagaccagaagatcaggaact

SEQ ID NO: 3037 - DNA, 22 bp, Artificial Sequence
  Description of Artificial Sequence: Synthetic oligonucleotide
agaccagaagatcaggaactct

SEQ ID NO: 3038 - DNA, 22 bp, Artificial Sequence
  Description of Artificial Sequence: Synthetic oligonucleotide
agcatttcagtagtgccaccag

SEQ ID NO: 3039 - DNA, 22 bp, Artificial Sequence
  Description of Artificial Sequence: Synthetic oligonucleotide
ctttattaccgttcttacgaag

SEQ ID NO: 3040 - DNA, 22 bp, Artificial Sequence
  Description of Artificial Sequence: Synthetic oligonucleotide
cctttattaccgttcttacgaa

SEQ ID NO: 3041 - DNA, 22 bp, Artificial Sequence
  Description of Artificial Sequence: Synthetic oligonucleotide
tcctttattaccgttcttacga

SEQ ID NO: 3042 - DNA, 22 bp, Artificial Sequence
  Description of Artificial Sequence: Synthetic oligonucleotide
ctcctttattaccgttcttacg

SEQ ID NO: 3043 - DNA, 22 bp, Artificial Sequence
  Description of Artificial Sequence: Synthetic oligonucleotide
attaccgttcttacgaagaaga

SEQ ID NO: 3044 - DNA, 22 bp, Artificial Sequence
  Description of Artificial Sequence: Synthetic oligonucleotide
tattaccgttcttacgaagaag

SEQ ID NO: 3045 - DNA, 22 bp, Artificial Sequence
  Description of Artificial Sequence: Synthetic oligonucleotide
ttattaccgttcttacgaagaa

SEQ ID NO: 3046 - DNA, 22 bp, Artificial Sequence
  Description of Artificial Sequence: Synthetic oligonucleotide
tttattaccgttcttacgaaga

SEQ ID NO: 3047 - DNA, 22 bp, Artificial Sequence
  Description of Artificial Sequence: Synthetic oligonucleotide
gctcctttattaccgttcttac

SEQ ID NO: 3048 - DNA, 22 bp, Artificial Sequence
  Description of Artificial Sequence: Synthetic oligonucleotide
atagcttcttcgcgggtgataa

SEQ ID NO: 3049 - DNA, 22 bp, Artificial Sequence
  Description of Artificial Sequence: Synthetic oligonucleotide
tagcttcttcgcgggtgataaa

SEQ ID NO: 3050 - DNA, 22 bp, Artificial Sequence
  Description of Artificial Sequence: Synthetic oligonucleotide
tatagcttcttcgcgggtgata

SEQ ID NO: 3051 - DNA, 22 bp, Artificial Sequence
  Description of Artificial Sequence: Synthetic oligonucleotide
ctctaccatcaaaaaagacagt

SEQ ID NO: 3052 - DNA, 22 bp, Artificial Sequence
  Description of Artificial Sequence: Synthetic oligonucleotide
actctaccatcaaaaaagacag

SEQ ID NO: 3053 - DNA, 22 bp, Artificial Sequence
  Description of Artificial Sequence: Synthetic oligonucleotide
catataggcagctctccctagc

SEQ ID NO: 3054 - DNA, 22 bp, Artificial Sequence
  Description of Artificial Sequence: Synthetic oligonucleotide
ccatataggcagctctccctag

SEQ ID NO: 3055 - DNA, 22 bp, Artificial Sequence
  Description of Artificial Sequence: Synthetic oligonucleotide
tccatataggcagctctcccta

SEQ ID NO: 3056 - DNA, 22 bp, Artificial Sequence
  Description of Artificial Sequence: Synthetic oligonucleotide
ttccatataggcagctctccct

SEQ ID NO: 3057 - DNA, 22 bp, Artificial Sequence
  Description of Artificial Sequence: Synthetic oligonucleotide
cttccatataggcagctctccc

SEQ ID NO: 3058 - DNA, 22 bp, Artificial Sequence
  Description of Artificial Sequence: Synthetic oligonucleotide
aatcagttccttgtctgattag

SEQ ID NO: 3059 - DNA, 22 bp, Artificial Sequence
  Description of Artificial Sequence: Synthetic oligonucleotide
aggaatagcagaaaggctaaaa

SEQ ID NO: 3060 - DNA, 22 bp, Artificial Sequence
  Description of Artificial Sequence: Synthetic oligonucleotide
ggaatagcagaaaggctaaaaa

SEQ ID NO: 3061 - DNA, 22 bp, Artificial Sequence
  Description of Artificial Sequence: Synthetic oligonucleotide
caaggaatagcagaaaggctaa

SEQ ID NO: 3062 - DNA, 22 bp, Artificial Sequence
  Description of Artificial Sequence: Synthetic oligonucleotide
aaggaatagcagaaaggctaaa

SEQ ID NO: 3063 - DNA, 22 bp, Artificial Sequence
  Description of Artificial Sequence: Synthetic oligonucleotide
aacaaggaatagcagaaaggct

SEQ ID NO: 3064 - DNA, 22 bp, Artificial Sequence
  Description of Artificial Sequence: Synthetic oligonucleotide
acaaggaatagcagaaaggcta

SEQ ID NO: 3065 - DNA, 22 bp, Artificial Sequence
  Description of Artificial Sequence: Synthetic oligonucleotide
aaacaaggaatagcagaaaggc

SEQ ID NO: 3066 - DNA, 22 bp, Artificial Sequence
  Description of Artificial Sequence: Synthetic oligonucleotide
ttaaaacaaggaatagcagaaa

SEQ ID NO: 3067 - DNA, 22 bp, Artificial Sequence
  Description of Artificial Sequence: Synthetic oligonucleotide
taaaacaaggaatagcagaaag

SEQ ID NO: 3068 - DNA, 22 bp, Artificial Sequence
  Description of Artificial Sequence: Synthetic oligonucleotide
ggtgaattgccctcgtatgttc

SEQ ID NO: 3069 - DNA, 22 bp, Artificial Sequence
  Description of Artificial Sequence: Synthetic oligonucleotide
tggtgaattgccctcgtatgtt

SEQ ID NO: 3070 - DNA, 22 bp, Artificial Sequence
  Description of Artificial Sequence: Synthetic oligonucleotide
tgaattgccctcgtatgttcca

SEQ ID NO: 3071 - DNA, 22 bp, Artificial Sequence
  Description of Artificial Sequence: Synthetic oligonucleotide
gtgaattgccctcgtatgttcc

SEQ ID NO: 3072 - DNA, 22 bp, Artificial Sequence
  Description of Artificial Sequence: Synthetic oligonucleotide
aaatggtgaattgccctcgtat

SEQ ID NO: 3073 - DNA, 22 bp, Artificial Sequence
  Description of Artificial Sequence: Synthetic oligonucleotide
gaaatggtgaattgccctcgta

SEQ ID NO: 3074 - DNA, 22 bp, Artificial Sequence
  Description of Artificial Sequence: Synthetic oligonucleotide
atggtgaattgccctcgtatgt

SEQ ID NO: 3075 - DNA, 22 bp, Artificial Sequence
  Description of Artificial Sequence: Synthetic oligonucleotide
aatggtgaattgccctcgtatg

SEQ ID NO: 3076 - DNA, 22 bp, Artificial Sequence
  Description of Artificial Sequence: Synthetic oligonucleotide
tgaaatggtgaattgccctcgt

SEQ ID NO: 3077 - DNA, 22 bp, Artificial Sequence
  Description of Artificial Sequence: Synthetic oligonucleotide
atgaaatggtgaattgccctcg

SEQ ID NO: 3078 - DNA, 22 bp, Artificial Sequence
  Description of Artificial Sequence: Synthetic oligonucleotide
ttctatagagacactcataaag

SEQ ID NO: 3079 - DNA, 22 bp, Artificial Sequence
  Description of Artificial Sequence: Synthetic oligonucleotide
tttctatagagacactcataaa

SEQ ID NO: 3080 - DNA, 22 bp, Artificial Sequence
  Description of Artificial Sequence: Synthetic oligonucleotide
ctatttctatagagacactcat

SEQ ID NO: 3081 - DNA, 22 bp, Artificial Sequence
  Description of Artificial Sequence: Synthetic oligonucleotide
tctatttctatagagacactca

SEQ ID NO: 3082 - DNA, 22 bp, Artificial Sequence
  Description of Artificial Sequence: Synthetic oligonucleotide
atttctatagagacactcataa

SEQ ID NO: 3083 - DNA, 22 bp, Artificial Sequence
  Description of Artificial Sequence: Synthetic oligonucleotide
tatttctatagagacactcata

SEQ ID NO: 3084 - DNA, 22 bp, Artificial Sequence
  Description of Artificial Sequence: Synthetic oligonucleotide
ctctatttctatagagacactc

SEQ ID NO: 3085 - DNA, 22 bp, Artificial Sequence
  Description of Artificial Sequence: Synthetic oligonucleotide
tctctatttctatagagacact

SEQ ID NO: 3086 - DNA, 22 bp, Artificial Sequence
  Description of Artificial Sequence: Synthetic oligonucleotide
tgaaagacatcagcatactcct

SEQ ID NO: 3087 - DNA, 22 bp, Artificial Sequence
  Description of Artificial Sequence: Synthetic oligonucleotide
gaaagacatcagcatactcctg

SEQ ID NO: 3088 - DNA, 22 bp, Artificial Sequence
  Description of Artificial Sequence: Synthetic oligonucleotide
agacatcagcatactcctgatt

SEQ ID NO: 3089 - DNA, 22 bp, Artificial Sequence
  Description of Artificial Sequence: Synthetic oligonucleotide
gacatcagcatactcctgatta

SEQ ID NO: 3090 - DNA, 22 bp, Artificial Sequence
  Description of Artificial Sequence: Synthetic oligonucleotide
aaagacatcagcatactcctga

SEQ ID NO: 3091 - DNA, 22 bp, Artificial Sequence
  Description of Artificial Sequence: Synthetic oligonucleotide
aagacatcagcatactcctgat

SEQ ID NO: 3092 - DNA, 22 bp, Artificial Sequence
  Description of Artificial Sequence: Synthetic oligonucleotide
atcagcatactcctgattagga

SEQ ID NO: 3093 - DNA, 22 bp, Artificial Sequence
  Description of Artificial Sequence: Synthetic oligonucleotide
tcagcatactcctgattaggat

SEQ ID NO: 3094 - DNA, 22 bp, Artificial Sequence
  Description of Artificial Sequence: Synthetic oligonucleotide
acatcagcatactcctgattag

SEQ ID NO: 3095 - DNA, 22 bp, Artificial Sequence
  Description of Artificial Sequence: Synthetic oligonucleotide
catcagcatactcctgattagg

SEQ ID NO: 3096 - DNA, 22 bp, Artificial Sequence
  Description of Artificial Sequence: Synthetic oligonucleotide
agaaaactcatctgagatattg

SEQ ID NO: 3097 - DNA, 22 bp, Artificial Sequence
  Description of Artificial Sequence: Synthetic oligonucleotide
gaaaactcatctgagatattga

SEQ ID NO: 3098 - DNA, 22 bp, Artificial Sequence
  Description of Artificial Sequence: Synthetic oligonucleotide
aaaactcatctgagatattgag

SEQ ID NO: 3099 - DNA, 22 bp, Artificial Sequence
  Description of Artificial Sequence: Synthetic oligonucleotide
aaactcatctgagatattgagt

SEQ ID NO: 3100 - DNA, 22 bp, Artificial Sequence
  Description of Artificial Sequence: Synthetic oligonucleotide
ctagaaaactcatctgagatat

SEQ ID NO: 3101 - DNA, 22 bp, Artificial Sequence
  Description of Artificial Sequence: Synthetic oligonucleotide
tagaaaactcatctgagatatt

SEQ ID NO: 3102 - DNA, 22 bp, Artificial Sequence
  Description of Artificial Sequence: Synthetic oligonucleotide
tatgtttgcgagcaagaacaag

SEQ ID NO: 3103 - DNA, 22 bp, Artificial Sequence
  Description of Artificial Sequence: Synthetic oligonucleotide
atgtttgcgagcaagaacaagt

SEQ ID NO: 3104 - DNA, 22 bp, Artificial Sequence
  Description of Artificial Sequence: Synthetic oligonucleotide
gtatgtttgcgagcaagaacaa

SEQ ID NO: 3105 - DNA, 22 bp, Artificial Sequence
  Description of Artificial Sequence: Synthetic oligonucleotide
tttgcgagcaagaacaagtgag

SEQ ID NO: 3106 - DNA, 22 bp, Artificial Sequence
  Description of Artificial Sequence: Synthetic oligonucleotide
ttgcgagcaagaacaagtgagg

SEQ ID NO: 3107 - DNA, 22 bp, Artificial Sequence
  Description of Artificial Sequence: Synthetic oligonucleotide
tgtttgcgagcaagaacaagtg

SEQ ID NO: 3108 - DNA, 22 bp, Artificial Sequence
  Description of Artificial Sequence: Synthetic oligonucleotide
gtttgcgagcaagaacaagtga

SEQ ID NO: 3109 - DNA, 22 bp, Artificial Sequence
  Description of Artificial Sequence: Synthetic oligonucleotide
ttgcagatgaaacatcatgcgt

SEQ ID NO: 3110 - DNA, 22 bp, Artificial Sequence
  Description of Artificial Sequence: Synthetic oligonucleotide
attgcagatgaaacatcatgcg

SEQ ID NO: 3111 - DNA, 22 bp, Artificial Sequence
  Description of Artificial Sequence: Synthetic oligonucleotide
taattgcagatgaaacatcatg

SEQ ID NO: 3112 - DNA, 22 bp, Artificial Sequence
  Description of Artificial Sequence: Synthetic oligonucleotide
ttaattgcagatgaaacatcat

SEQ ID NO: 3113 - DNA, 22 bp, Artificial Sequence
  Description of Artificial Sequence: Synthetic oligonucleotide
tgttaattgcagatgaaacatc

SEQ ID NO: 3114 - DNA, 22 bp, Artificial Sequence
  Description of Artificial Sequence: Synthetic oligonucleotide
ctgttaattgcagatgaaacat

SEQ ID NO: 3115 - DNA, 22 bp, Artificial Sequence
  Description of Artificial Sequence: Synthetic oligonucleotide
ccaatatttaaaataacggtca

SEQ ID NO: 3116 - DNA, 22 bp, Artificial Sequence
  Description of Artificial Sequence: Synthetic oligonucleotide
caatatttaaaataacggtcaa

SEQ ID NO: 3117 - DNA, 22 bp, Artificial Sequence
  Description of Artificial Sequence: Synthetic oligonucleotide
aatatttaaaataacggtcaaa

SEQ ID NO: 3118 - DNA, 22 bp, Artificial Sequence
  Description of Artificial Sequence: Synthetic oligonucleotide
atatttaaaataacggtcaaag

SEQ ID NO: 3119 - DNA, 22 bp, Artificial Sequence
  Description of Artificial Sequence: Synthetic oligonucleotide
tatttaaaataacggtcaaaga

SEQ ID NO: 3120 - DNA, 22 bp, Artificial Sequence
  Description of Artificial Sequence: Synthetic oligonucleotide
atttaaaataacggtcaaagag

SEQ ID NO: 3121 - DNA, 22 bp, Artificial Sequence
  Description of Artificial Sequence: Synthetic oligonucleotide
tcccaatatttaaaataacggt

SEQ ID NO: 3122 - DNA, 22 bp, Artificial Sequence
  Description of Artificial Sequence: Synthetic oligonucleotide
cccaatatttaaaataacggtc

SEQ ID NO: 3123 - DNA, 22 bp, Artificial Sequence
  Description of Artificial Sequence: Synthetic oligonucleotide
gcaccacctaaattgcaacgtg

SEQ ID NO: 3124 - DNA, 22 bp, Artificial Sequence
  Description of Artificial Sequence: Synthetic oligonucleotide
agcaccacctaaattgcaacgt

SEQ ID NO: 3125 - DNA, 22 bp, Artificial Sequence
  Description of Artificial Sequence: Synthetic oligonucleotide
cagcaccacctaaattgcaacg

SEQ ID NO: 3126 - DNA, 22 bp, Artificial Sequence
  Description of Artificial Sequence: Synthetic oligonucleotide
acagcaccacctaaattgcaac

SEQ ID NO: 3127 - DNA, 22 bp, Artificial Sequence
  Description of Artificial Sequence: Synthetic oligonucleotide
agacagcaccacctaaattgca

SEQ ID NO: 3128 - DNA, 22 bp, Artificial Sequence
  Description of Artificial Sequence: Synthetic oligonucleotide
cagacagcaccacctaaattgc

SEQ ID NO: 3129 - DNA, 22 bp, Artificial Sequence
  Description of Artificial Sequence: Synthetic oligonucleotide
cactaatggcatacttaagatt

SEQ ID NO: 3130 - DNA, 22 bp, Artificial Sequence
  Description of Artificial Sequence: Synthetic oligonucleotide
actaatggcatacttaagattc

SEQ ID NO: 3131 - DNA, 22 bp, Artificial Sequence
  Description of Artificial Sequence: Synthetic oligonucleotide
ctaatggcatacttaagattca

SEQ ID NO: 3132 - DNA, 22 bp, Artificial Sequence
  Description of Artificial Sequence: Synthetic oligonucleotide
taatggcatacttaagattcat

SEQ ID NO: 3133 - DNA, 22 bp, Artificial Sequence
  Description of Artificial Sequence: Synthetic oligonucleotide
aatggcatacttaagattcatt

SEQ ID NO: 3134 - DNA, 22 bp, Artificial Sequence
  Description of Artificial Sequence: Synthetic oligonucleotide
atggcatacttaagattcattt

SEQ ID NO: 3135 - DNA, 22 bp, Artificial Sequence
  Description of Artificial Sequence: Synthetic oligonucleotide
tggcatacttaagattcatttg

SEQ ID NO: 3136 - DNA, 22 bp, Artificial Sequence
  Description of Artificial Sequence: Synthetic oligonucleotide
ggcatacttaagattcatttga

SEQ ID NO: 3137 - DNA, 22 bp, Artificial Sequence
  Description of Artificial Sequence: Synthetic oligonucleotide
tgcactaatggcatacttaaga

SEQ ID NO: 3138 - DNA, 22 bp, Artificial Sequence
  Description of Artificial Sequence: Synthetic oligonucleotide
gcactaatggcatacttaagat

SEQ ID NO: 3139 - DNA, 22 bp, Artificial Sequence
  Description of Artificial Sequence: Synthetic oligonucleotide
taccagtgtgtgtacacaacat

SEQ ID NO: 3140 - DNA, 22 bp, Artificial Sequence
  Description of Artificial Sequence: Synthetic oligonucleotide
accagtgtgtgtacacaacatc

SEQ ID NO: 3141 - DNA, 22 bp, Artificial Sequence
  Description of Artificial Sequence: Synthetic oligonucleotide
agtgtgtgtacacaacatctta

SEQ ID NO: 3142 - DNA, 22 bp, Artificial Sequence
  Description of Artificial Sequence: Synthetic oligonucleotide
gtgtgtgtacacaacatcttaa

SEQ ID NO: 3143 - DNA, 22 bp, Artificial Sequence
  Description of Artificial Sequence: Synthetic oligonucleotide
ccagtgtgtgtacacaacatct

SEQ ID NO: 3144 - DNA, 22 bp, Artificial Sequence
  Description of Artificial Sequence: Synthetic oligonucleotide
cagtgtgtgtacacaacatctt

SEQ ID NO: 3145 - DNA, 22 bp, Artificial Sequence
  Description of Artificial Sequence: Synthetic oligonucleotide
tgtgtacacaacatcttaacac

SEQ ID NO: 3146 - DNA, 22 bp, Artificial Sequence
  Description of Artificial Sequence: Synthetic oligonucleotide
gtgtacacaacatcttaacaca

SEQ ID NO: 3147 - DNA, 22 bp, Artificial Sequence
  Description of Artificial Sequence: Synthetic oligonucleotide
tgtgtgtacacaacatcttaac

SEQ ID NO: 3148 - DNA, 22 bp, Artificial Sequence
  Description of Artificial Sequence: Synthetic oligonucleotide
gtgtgtacacaacatcttaaca

SEQ ID NO: 3149 - DNA, 22 bp, Artificial Sequence
  Description of Artificial Sequence: Synthetic oligonucleotide
ccaattaaaaatgcttcagatg

SEQ ID NO: 3150 - DNA, 22 bp, Artificial Sequence
  Description of Artificial Sequence: Synthetic oligonucleotide
caattaaaaatgcttcagatga

SEQ ID NO: 3151 - DNA, 22 bp, Artificial Sequence
  Description of Artificial Sequence: Synthetic oligonucleotide
aattaaaaatgcttcagatgat

SEQ ID NO: 3152 - DNA, 22 bp, Artificial Sequence
  Description of Artificial Sequence: Synthetic oligonucleotide
attaaaaatgcttcagatgatg

SEQ ID NO: 3153 - DNA, 22 bp, Artificial Sequence
  Description of Artificial Sequence: Synthetic oligonucleotide
caggtataattctactacattt

SEQ ID NO: 3154 - DNA, 22 bp, Artificial Sequence
  Description of Artificial Sequence: Synthetic oligonucleotide
gcaggtataattctactacatt

SEQ ID NO: 3155 - DNA, 22 bp, Artificial Sequence
  Description of Artificial Sequence: Synthetic oligonucleotide
acaaccattagtttggctgctg

SEQ ID NO: 3156 - DNA, 22 bp, Artificial Sequence
  Description of Artificial Sequence: Synthetic oligonucleotide
caaccattagtttggctgctgt

SEQ ID NO: 3157 - DNA, 22 bp, Artificial Sequence
  Description of Artificial Sequence: Synthetic oligonucleotide
ccctaatgttacacactgatta

SEQ ID NO: 3158 - DNA, 22 bp, Artificial Sequence
  Description of Artificial Sequence: Synthetic oligonucleotide
cctaatgttacacactgattaa

SEQ ID NO: 3159 - DNA, 22 bp, Artificial Sequence
  Description of Artificial Sequence: Synthetic oligonucleotide
aatgtggtggctctttcaagtc

SEQ ID NO: 3160 - DNA, 22 bp, Artificial Sequence
  Description of Artificial Sequence: Synthetic oligonucleotide
tccctaatgttacacactgatt

SEQ ID NO: 3161 - DNA, 22 bp, Artificial Sequence
  Description of Artificial Sequence: Synthetic oligonucleotide
aatgttacacactgattaaaga

SEQ ID NO: 3162 - DNA, 22 bp, Artificial Sequence
  Description of Artificial Sequence: Synthetic oligonucleotide
atgttacacactgattaaagat

SEQ ID NO: 3163 - DNA, 22 bp, Artificial Sequence
  Description of Artificial Sequence: Synthetic oligonucleotide
ctaatgttacacactgattaaa

SEQ ID NO: 3164 - DNA, 22 bp, Artificial Sequence
  Description of Artificial Sequence: Synthetic oligonucleotide
taatgttacacactgattaaag

SEQ ID NO: 3165 - DNA, 22 bp, Artificial Sequence
  Description of Artificial Sequence: Synthetic oligonucleotide
aaaatgtggtggctctttcaag

SEQ ID NO: 3166 - DNA, 22 bp, Artificial Sequence
  Description of Artificial Sequence: Synthetic oligonucleotide
aaatgtggtggctctttcaagt

SEQ ID NO: 3167 - DNA, 22 bp, Artificial Sequence
  Description of Artificial Sequence: Synthetic oligonucleotide
agcaggagaagttcccctactg

SEQ ID NO: 3168 - DNA, 22 bp, Artificial Sequence
  Description of Artificial Sequence: Synthetic oligonucleotide
aaacccttagacacagcaaagt

SEQ ID NO: 3169 - DNA, 22 bp, Artificial Sequence
  Description of Artificial Sequence: Synthetic oligonucleotide
gaaacccttagacacagcaaag

SEQ ID NO: 3170 - DNA, 22 bp, Artificial Sequence
  Description of Artificial Sequence: Synthetic oligonucleotide
agaaacccttagacacagcaaa

SEQ ID NO: 3171 - DNA, 22 bp, Artificial Sequence
  Description of Artificial Sequence: Synthetic oligonucleotide
aagaaacccttagacacagcaa

SEQ ID NO: 3172 - DNA, 22 bp, Artificial Sequence
  Description of Artificial Sequence: Synthetic oligonucleotide
aaagaaacccttagacacagca

SEQ ID NO: 3173 - DNA, 22 bp, Artificial Sequence
  Description of Artificial Sequence: Synthetic oligonucleotide
taaagaaacccttagacacagc

SEQ ID NO: 3174 - DNA, 22 bp, Artificial Sequence
  Description of Artificial Sequence: Synthetic oligonucleotide
cttaaagaaacccttagacaca

SEQ ID NO: 3175 - DNA, 22 bp, Artificial Sequence
  Description of Artificial Sequence: Synthetic oligonucleotide
ccttaaagaaacccttagacac

SEQ ID NO: 3176 - DNA, 22 bp, Artificial Sequence
  Description of Artificial Sequence: Synthetic oligonucleotide
tccttaaagaaacccttagaca

SEQ ID NO: 3177 - DNA, 22 bp, Artificial Sequence
  Description of Artificial Sequence: Synthetic oligonucleotide
cattaagatctgaatcgacaag

SEQ ID NO: 3178 - DNA, 22 bp, Artificial Sequence
  Description of Artificial Sequence: Synthetic oligonucleotide
tcattaagatctgaatcgacaa

SEQ ID NO: 3179 - DNA, 22 bp, Artificial Sequence
  Description of Artificial Sequence: Synthetic oligonucleotide
attaagatctgaatcgacaagc

SEQ ID NO: 3180 - DNA, 22 bp, Artificial Sequence
  Description of Artificial Sequence: Synthetic oligonucleotide
cctaagaaacaataaactagca

SEQ ID NO: 3181 - DNA, 22 bp, Artificial Sequence
  Description of Artificial Sequence: Synthetic oligonucleotide
gcctaagaaacaataaactagc

SEQ ID NO: 3182 - DNA, 22 bp, Artificial Sequence
  Description of Artificial Sequence: Synthetic oligonucleotide
agcctaagaaacaataaactag

SEQ ID NO: 3183 - DNA, 22 bp, Artificial Sequence
  Description of Artificial Sequence: Synthetic oligonucleotide
tagcctaagaaacaataaacta

SEQ ID NO: 3184 - DNA, 22 bp, Artificial Sequence
  Description of Artificial Sequence: Synthetic oligonucleotide
atagcctaagaaacaataaact

SEQ ID NO: 3185 - DNA, 22 bp, Artificial Sequence
  Description of Artificial Sequence: Synthetic oligonucleotide
aatagcctaagaaacaataaac

SEQ ID NO: 3186 - DNA, 22 bp, Artificial Sequence
  Description of Artificial Sequence: Synthetic oligonucleotide
aaatagcctaagaaacaataaa

SEQ ID NO: 3187 - DNA, 22 bp, Artificial Sequence
  Description of Artificial Sequence: Synthetic oligonucleotide
aaaatagcctaagaaacaataa

SEQ ID NO: 3188 - DNA, 22 bp, Artificial Sequence
  Description of Artificial Sequence: Synthetic oligonucleotide
aaaaatagcctaagaaacaata

SEQ ID NO: 3189 - DNA, 22 bp, Artificial Sequence
  Description of Artificial Sequence: Synthetic oligonucleotide
caaaaatagcctaagaaacaat

SEQ ID NO: 3190 - DNA, 22 bp, Artificial Sequence
  Description of Artificial Sequence: Synthetic oligonucleotide
gtcattaagatctgaatcgaca

SEQ ID NO: 3191 - DNA, 22 bp, Artificial Sequence
  Description of Artificial Sequence: Synthetic oligonucleotide
tagtagcagcaagattagcaga

SEQ ID NO: 3192 - DNA, 22 bp, Artificial Sequence
  Description of Artificial Sequence: Synthetic oligonucleotide
attattgggtaaaccttggggc

SEQ ID NO: 3193 - DNA, 22 bp, Artificial Sequence
  Description of Artificial Sequence: Synthetic oligonucleotide
tattattgggtaaaccttgggg

SEQ ID NO: 3194 - DNA, 22 bp, Artificial Sequence
  Description of Artificial Sequence: Synthetic oligonucleotide
atgaggttccacctggtttaac

SEQ ID NO: 3195 - DNA, 22 bp, Artificial Sequence
  Description of Artificial Sequence: Synthetic oligonucleotide
gatgaggttccacctggtttaa

SEQ ID NO: 3196 - DNA, 22 bp, Artificial Sequence
  Description of Artificial Sequence: Synthetic oligonucleotide
tgaggttccacctggtttaaca

SEQ ID NO: 3197 - DNA, 22 bp, Artificial Sequence
  Description of Artificial Sequence: Synthetic oligonucleotide
cagtattattgggtaaaccttg

SEQ ID NO: 3198 - DNA, 22 bp, Artificial Sequence
  Description of Artificial Sequence: Synthetic oligonucleotide
gcagtattattgggtaaacctt

SEQ ID NO: 3199 - DNA, 22 bp, Artificial Sequence
  Description of Artificial Sequence: Synthetic oligonucleotide
cacttgaaattgcaccaaaatt

SEQ ID NO: 3200 - DNA, 22 bp, Artificial Sequence
  Description of Artificial Sequence: Synthetic oligonucleotide
acacttgaaattgcaccaaaat

SEQ ID NO: 3201 - DNA, 22 bp, Artificial Sequence
  Description of Artificial Sequence: Synthetic oligonucleotide
cttgaaattgcaccaaaattgg

SEQ ID NO: 3202 - DNA, 22 bp, Artificial Sequence
  Description of Artificial Sequence: Synthetic oligonucleotide
acttgaaattgcaccaaaattg

SEQ ID NO: 3203 - DNA, 22 bp, Artificial Sequence
  Description of Artificial Sequence: Synthetic oligonucleotide
aacacttgaaattgcaccaaaa

SEQ ID NO: 3204-4000 - skipped (797 entries)

SEQ ID NO: 4001 - RNA, 22 nt, Artificial Sequence
  Description of Artificial Sequence: Synthetic oligonucleotide
ucaucaaauaaguaguauguag

SEQ ID NO: 4002 - RNA, 22 nt, Artificial Sequence
  Description of Artificial Sequence: Synthetic oligonucleotide
caucaaauaaguaguauguagc

SEQ ID NO: 4003 - RNA, 22 nt, Artificial Sequence
  Description of Artificial Sequence: Synthetic oligonucleotide
aaacacuauuagcauaagcagu

SEQ ID NO: 4004 - RNA, 22 nt, Artificial Sequence
  Description of Artificial Sequence: Synthetic oligonucleotide
aaaacacuauuagcauaagcag

SEQ ID NO: 4005 - RNA, 22 nt, Artificial Sequence
  Description of Artificial Sequence: Synthetic oligonucleotide
uauuagcauaagcaguuguggc

SEQ ID NO: 4006 - RNA, 22 nt, Artificial Sequence
  Description of Artificial Sequence: Synthetic oligonucleotide
cuauuagcauaagcaguugugg

SEQ ID NO: 4007 - RNA, 22 nt, Artificial Sequence
  Description of Artificial Sequence: Synthetic oligonucleotide
uuagcauaagcaguuguggcau

SEQ ID NO: 4008 - RNA, 22 nt, Artificial Sequence
  Description of Artificial Sequence: Synthetic oligonucleotide
auuagcauaagcaguuguggca

SEQ ID NO: 4009 - RNA, 22 nt, Artificial Sequence
  Description of Artificial Sequence: Synthetic oligonucleotide
acacuauuagcauaagcaguug

SEQ ID NO: 4010 - RNA, 22 nt, Artificial Sequence
  Description of Artificial Sequence: Synthetic oligonucleotide
aacacuauuagcauaagcaguu

SEQ ID NO: 4011 - RNA, 22 nt, Artificial Sequence
  Description of Artificial Sequence: Synthetic oligonucleotide
acuauuagcauaagcaguugug

SEQ ID NO: 4012 - RNA, 22 nt, Artificial Sequence
  Description of Artificial Sequence: Synthetic oligonucleotide
cacuauuagcauaagcaguugu

SEQ ID NO: 4013 - RNA, 22 nt, Artificial Sequence
  Description of Artificial Sequence: Synthetic oligonucleotide
cgauauguucgaaggcauagcc

SEQ ID NO: 4014 - RNA, 22 nt, Artificial Sequence
  Description of Artificial Sequence: Synthetic oligonucleotide
acgauauguucgaaggcauagc

SEQ ID NO: 4015 - RNA, 22 nt, Artificial Sequence
  Description of Artificial Sequence: Synthetic oligonucleotide
ucuagccuuaccccauuuauua

SEQ ID NO: 4016 - RNA, 22 nt, Artificial Sequence
  Description of Artificial Sequence: Synthetic oligonucleotide
cuagccuuaccccauuuauuaa

SEQ ID NO: 4017 - RNA, 22 nt, Artificial Sequence
  Description of Artificial Sequence: Synthetic oligonucleotide
uagccuuaccccauuuauuaaa

SEQ ID NO: 4018 - RNA, 22 nt, Artificial Sequence
  Description of Artificial Sequence: Synthetic oligonucleotide
agccuuaccccauuuauuaaau

SEQ ID NO: 4019 - RNA, 22 nt, Artificial Sequence
  Description of Artificial Sequence: Synthetic oligonucleotide
gccuuaccccauuuauuaaaug

SEQ ID NO: 4020 - RNA, 22 nt, Artificial Sequence
  Description of Artificial Sequence: Synthetic oligonucleotide
ccuuaccccauuuauuaaaugg

SEQ ID NO: 4021 - RNA, 22 nt, Artificial Sequence
  Description of Artificial Sequence: Synthetic oligonucleotide
cuuaccccauuuauuaaaugga

SEQ ID NO: 4022 - RNA, 22 nt, Artificial Sequence
  Description of Artificial Sequence: Synthetic oligonucleotide
uuaccccauuuauuaaauggaa

SEQ ID NO: 4023 - RNA, 22 nt, Artificial Sequence
  Description of Artificial Sequence: Synthetic oligonucleotide
agucuagccuuaccccauuuau

SEQ ID NO: 4024 - RNA, 22 nt, Artificial Sequence
  Description of Artificial Sequence: Synthetic oligonucleotide
gucuagccuuaccccauuuauu

SEQ ID NO: 4025 - RNA, 22 nt, Artificial Sequence
  Description of Artificial Sequence: Synthetic oligonucleotide
guaugcgguguguacauagccu

SEQ ID NO: 4026 - RNA, 22 nt, Artificial Sequence
  Description of Artificial Sequence: Synthetic oligonucleotide
uguaugcgguguguacauagcc

SEQ ID NO: 4027 - RNA, 22 nt, Artificial Sequence
  Description of Artificial Sequence: Synthetic oligonucleotide
cuguaugcgguguguacauagc

SEQ ID NO: 4028 - RNA, 22 nt, Artificial Sequence
  Description of Artificial Sequence: Synthetic oligonucleotide
acuguaugcgguguguacauag

SEQ ID NO: 4029 - RNA, 22 nt, Artificial Sequence
  Description of Artificial Sequence: Synthetic oligonucleotide
gacuguaugcgguguguacaua

SEQ ID NO: 4030 - RNA, 22 nt, Artificial Sequence
  Description of Artificial Sequence: Synthetic oligonucleotide
agacuguaugcgguguguacau

SEQ ID NO: 4031 - RNA, 22 nt, Artificial Sequence
  Description of Artificial Sequence: Synthetic oligonucleotide
aagacuguaugcgguguguaca

SEQ ID NO: 4032 - RNA, 22 nt, Artificial Sequence
  Description of Artificial Sequence: Synthetic oligonucleotide
cagccauaaccuuuccacauac

SEQ ID NO: 4033 - RNA, 22 nt, Artificial Sequence
  Description of Artificial Sequence: Synthetic oligonucleotide
agccauaaccuuuccacauacc

SEQ ID NO: 4034 - RNA, 22 nt, Artificial Sequence
  Description of Artificial Sequence: Synthetic oligonucleotide
ccuuuccacauaccgcagacgg

SEQ ID NO: 4035 - RNA, 22 nt, Artificial Sequence
  Description of Artificial Sequence: Synthetic oligonucleotide
aaccuuuccacauaccgcagac

SEQ ID NO: 4036 - RNA, 22 nt, Artificial Sequence
  Description of Artificial Sequence: Synthetic oligonucleotide
cauaaccuuuccacauaccgca

SEQ ID NO: 4037 - RNA, 22 nt, Artificial Sequence
  Description of Artificial Sequence: Synthetic oligonucleotide
auaaccuuuccacauaccgcag

SEQ ID NO: 4038 - RNA, 22 nt, Artificial Sequence
  Description of Artificial Sequence: Synthetic oligonucleotide
gccauaaccuuuccacauaccg

SEQ ID NO: 4039 - RNA, 22 nt, Artificial Sequence
  Description of Artificial Sequence: Synthetic oligonucleotide
ccauaaccuuuccacauaccgc

SEQ ID NO: 4040 - RNA, 22 nt, Artificial Sequence
  Description of Artificial Sequence: Synthetic oligonucleotide
ccgucaccaccacgaauucguc

SEQ ID NO: 4041 - RNA, 22 nt, Artificial Sequence
  Description of Artificial Sequence: Synthetic oligonucleotide
caaacugaguuggacguguguu

SEQ ID NO: 4042 - RNA, 22 nt, Artificial Sequence
  Description of Artificial Sequence: Synthetic oligonucleotide
gcaaacugaguuggacgugugu

SEQ ID NO: 4043 - RNA, 22 nt, Artificial Sequence
  Description of Artificial Sequence: Synthetic oligonucleotide
aaacugaguuggacguguguuu

SEQ ID NO: 4044 - RNA, 22 nt, Artificial Sequence
  Description of Artificial Sequence: Synthetic oligonucleotide
ggcaaacugaguuggacgugug

SEQ ID NO: 4045 - RNA, 22 nt, Artificial Sequence
  Description of Artificial Sequence: Synthetic oligonucleotide
aggcaaacugaguuggacgugu

SEQ ID NO: 4046 - RNA, 22 nt, Artificial Sequence
  Description of Artificial Sequence: Synthetic oligonucleotide
cgacaaguuccgaggaacaugu

SEQ ID NO: 4047 - RNA, 22 nt, Artificial Sequence
  Description of Artificial Sequence: Synthetic oligonucleotide
aaguuccgaggaacaugucugg

SEQ ID NO: 4048 - RNA, 22 nt, Artificial Sequence
  Description of Artificial Sequence: Synthetic oligonucleotide
gacaaguuccgaggaacauguc

SEQ ID NO: 4049 - RNA, 22 nt, Artificial Sequence
  Description of Artificial Sequence: Synthetic oligonucleotide
acaaguuccgaggaacaugucu

SEQ ID NO: 4050 - RNA, 22 nt, Artificial Sequence
  Description of Artificial Sequence: Synthetic oligonucleotide
aggaucauaaacuguguuguug

SEQ ID NO: 4051 - RNA, 22 nt, Artificial Sequence
  Description of Artificial Sequence: Synthetic oligonucleotide
ggaucauaaacuguguuguuga

SEQ ID NO: 4052 - RNA, 22 nt, Artificial Sequence
  Description of Artificial Sequence: Synthetic oligonucleotide
gaaaccuauuacuagguuccau

SEQ ID NO: 4053 - RNA, 22 nt, Artificial Sequence
  Description of Artificial Sequence: Synthetic oligonucleotide
gagaauucauucugcacaagag

SEQ ID NO: 4054 - RNA, 22 nt, Artificial Sequence
  Description of Artificial Sequence: Synthetic oligonucleotide
agaauucauucugcacaagagu

SEQ ID NO: 4055 - RNA, 22 nt, Artificial Sequence
  Description of Artificial Sequence: Synthetic oligonucleotide
auucauucugcacaagaguaga

SEQ ID NO: 4056 - RNA, 22 nt, Artificial Sequence
  Description of Artificial Sequence: Synthetic oligonucleotide
uucauucugcacaagaguagac

SEQ ID NO: 4057 - RNA, 22 nt, Artificial Sequence
  Description of Artificial Sequence: Synthetic oligonucleotide
gaauucauucugcacaagagua

SEQ ID NO: 4058 - RNA, 22 nt, Artificial Sequence
  Description of Artificial Sequence: Synthetic oligonucleotide
aauucauucugcacaagaguag

SEQ ID NO: 4059 - RNA, 22 nt, Artificial Sequence
  Description of Artificial Sequence: Synthetic oligonucleotide
auucugcacaagaguagacuau

SEQ ID NO: 4060 - RNA, 22 nt, Artificial Sequence
  Description of Artificial Sequence: Synthetic oligonucleotide
uucugcacaagaguagacuaua

SEQ ID NO: 4061 - RNA, 22 nt, Artificial Sequence
  Description of Artificial Sequence: Synthetic oligonucleotide
ucauucugcacaagaguagacu

SEQ ID NO: 4062 - RNA, 22 nt, Artificial Sequence
  Description of Artificial Sequence: Synthetic oligonucleotide
cauucugcacaagaguagacua

SEQ ID NO: 4063 - RNA, 22 nt, Artificial Sequence
  Description of Artificial Sequence: Synthetic oligonucleotide
ucauaaaggucucuaucagaca

SEQ ID NO: 4064 - RNA, 22 nt, Artificial Sequence
  Description of Artificial Sequence: Synthetic oligonucleotide
gucauaaaggucucuaucagac

SEQ ID NO: 4065 - RNA, 22 nt, Artificial Sequence
  Description of Artificial Sequence: Synthetic oligonucleotide
ugucauaaaggucucuaucaga

SEQ ID NO: 4066 - RNA, 22 nt, Artificial Sequence
  Description of Artificial Sequence: Synthetic oligonucleotide
uugucauaaaggucucuaucag

SEQ ID NO: 4067 - RNA, 22 nt, Artificial Sequence
  Description of Artificial Sequence: Synthetic oligonucleotide
uugaauuggcaggcacuucugu

SEQ ID NO: 4068 - RNA, 22 nt, Artificial Sequence
  Description of Artificial Sequence: Synthetic oligonucleotide
acaguugaauuggcaggcacuu

SEQ ID NO: 4069 - RNA, 22 nt, Artificial Sequence
  Description of Artificial Sequence: Synthetic oligonucleotide
caguugaauuggcaggcacuuc

SEQ ID NO: 4070 - RNA, 22 nt, Artificial Sequence
  Description of Artificial Sequence: Synthetic oligonucleotide
aguugaauuggcaggcacuucu

SEQ ID NO: 4071 - RNA, 22 nt, Artificial Sequence
  Description of Artificial Sequence: Synthetic oligonucleotide
ggccuuguuguuguuggccuuu

SEQ ID NO: 4072 - RNA, 22 nt, Artificial Sequence
  Description of Artificial Sequence: Synthetic oligonucleotide
gccuuguuguuguuggccuuua

SEQ ID NO: 4073 - RNA, 22 nt, Artificial Sequence
  Description of Artificial Sequence: Synthetic oligonucleotide
ccuuguuguuguuggccuuuac

SEQ ID NO: 4074 - RNA, 22 nt, Artificial Sequence
  Description of Artificial Sequence: Synthetic oligonucleotide
cuuguuguuguuggccuuuacc

SEQ ID NO: 4075 - RNA, 22 nt, Artificial Sequence
  Description of Artificial Sequence: Synthetic oligonucleotide
uuguuguuguuggccuuuacca

SEQ ID NO: 4076 - RNA, 22 nt, Artificial Sequence
  Description of Artificial Sequence: Synthetic oligonucleotide
uguuguuguuggccuuuaccag

SEQ ID NO: 4077 - RNA, 22 nt, Artificial Sequence
  Description of Artificial Sequence: Synthetic oligonucleotide
guuguuguuggccuuuaccaga

SEQ ID NO: 4078 - RNA, 22 nt, Artificial Sequence
  Description of Artificial Sequence: Synthetic oligonucleotide
uuguuguuggccuuuaccagac

SEQ ID NO: 4079 - RNA, 22 nt, Artificial Sequence
  Description of Artificial Sequence: Synthetic oligonucleotide
uuggccuuguuguuguuggccu

SEQ ID NO: 4080 - RNA, 22 nt, Artificial Sequence
  Description of Artificial Sequence: Synthetic oligonucleotide
uggccuuguuguuguuggccuu

SEQ ID NO: 4081 - RNA, 22 nt, Artificial Sequence
  Description of Artificial Sequence: Synthetic oligonucleotide
cgcucugaaaaacagcaagaag

SEQ ID NO: 4082 - RNA, 22 nt, Artificial Sequence
  Description of Artificial Sequence: Synthetic oligonucleotide
gcucugaaaaacagcaagaagu

SEQ ID NO: 4083 - RNA, 22 nt, Artificial Sequence
  Description of Artificial Sequence: Synthetic oligonucleotide
agcgcucugaaaaacagcaaga

SEQ ID NO: 4084 - RNA, 22 nt, Artificial Sequence
  Description of Artificial Sequence: Synthetic oligonucleotide
gcgcucugaaaaacagcaagaa

SEQ ID NO: 4085 - RNA, 22 nt, Artificial Sequence
  Description of Artificial Sequence: Synthetic oligonucleotide
cugaaaaacagcaagaagugca

SEQ ID NO: 4086 - RNA, 22 nt, Artificial Sequence
  Description of Artificial Sequence: Synthetic oligonucleotide
ugaaaaacagcaagaagugcaa

SEQ ID NO: 4087 - RNA, 22 nt, Artificial Sequence
  Description of Artificial Sequence: Synthetic oligonucleotide
cucugaaaaacagcaagaagug

SEQ ID NO: 4088 - RNA, 22 nt, Artificial Sequence
  Description of Artificial Sequence: Synthetic oligonucleotide
ucugaaaaacagcaagaagugc

SEQ ID NO: 4089 - RNA, 22 nt, Artificial Sequence
  Description of Artificial Sequence: Synthetic oligonucleotide
gaagcgcucugaaaaacagcaa

SEQ ID NO: 4090 - RNA, 22 nt, Artificial Sequence
  Description of Artificial Sequence: Synthetic oligonucleotide
aagcgcucugaaaaacagcaag

SEQ ID NO: 4091 - RNA, 22 nt, Artificial Sequence
  Description of Artificial Sequence: Synthetic oligonucleotide
gguucucauagagaacauucug

SEQ ID NO: 4092 - RNA, 22 nt, Artificial Sequence
  Description of Artificial Sequence: Synthetic oligonucleotide
ugguucucauagagaacauucu

SEQ ID NO: 4093 - RNA, 22 nt, Artificial Sequence
  Description of Artificial Sequence: Synthetic oligonucleotide
guucgcggaguugaucacaacu

SEQ ID NO: 4094 - RNA, 22 nt, Artificial Sequence
  Description of Artificial Sequence: Synthetic oligonucleotide
gguucgcggaguugaucacaac

SEQ ID NO: 4095 - RNA, 22 nt, Artificial Sequence
  Description of Artificial Sequence: Synthetic oligonucleotide
ucgcggaguugaucacaacuac

SEQ ID NO: 4096 - RNA, 22 nt, Artificial Sequence
  Description of Artificial Sequence: Synthetic oligonucleotide
uucgcggaguugaucacaacua

SEQ ID NO: 4097 - RNA, 22 nt, Artificial Sequence
  Description of Artificial Sequence: Synthetic oligonucleotide
ggguucgcggaguugaucacaa

SEQ ID NO: 4098 - RNA, 22 nt, Artificial Sequence
  Description of Artificial Sequence: Synthetic oligonucleotide
cauacaaacugccaccaucaca

SEQ ID NO: 4099 - RNA, 22 nt, Artificial Sequence
  Description of Artificial Sequence: Synthetic oligonucleotide
acauacaaacugccaccaucac

SEQ ID NO: 4100 - RNA, 22 nt, Artificial Sequence
  Description of Artificial Sequence: Synthetic oligonucleotide
aggaugaaauggugaauugccc

SEQ ID NO: 4101 - RNA, 22 nt, Artificial Sequence
  Description of Artificial Sequence: Synthetic oligonucleotide
gaggaugaaauggugaauugcc

SEQ ID NO: 4102 - RNA, 22 nt, Artificial Sequence
  Description of Artificial Sequence: Synthetic oligonucleotide
gaugaaauggugaauugcccuc

SEQ ID NO: 4103 - RNA, 22 nt, Artificial Sequence
  Description of Artificial Sequence: Synthetic oligonucleotide
ggaugaaauggugaauugcccu

SEQ ID NO: 4104 - RNA, 22 nt, Artificial Sequence
  Description of Artificial Sequence: Synthetic oligonucleotide
agaggaugaaauggugaauugc

SEQ ID NO: 4105 - RNA, 22 nt, Artificial Sequence
  Description of Artificial Sequence: Synthetic oligonucleotide
guccuuuaguaaggucagucuc

SEQ ID NO: 4106 - RNA, 22 nt, Artificial Sequence
  Description of Artificial Sequence: Synthetic oligonucleotide
uaguaaggucagucucagucca

SEQ ID NO: 4107 - RNA, 22 nt, Artificial Sequence
  Description of Artificial Sequence: Synthetic oligonucleotide
aguaaggucagucucaguccaa

SEQ ID NO: 4108 - RNA, 22 nt, Artificial Sequence
  Description of Artificial Sequence: Synthetic oligonucleotide
guaaggucagucucaguccaac

SEQ ID NO: 4109 - RNA, 22 nt, Artificial Sequence
  Description of Artificial Sequence: Synthetic oligonucleotide
uaaggucagucucaguccaaca

SEQ ID NO: 4110 - RNA, 22 nt, Artificial Sequence
  Description of Artificial Sequence: Synthetic oligonucleotide
ccuuuaguaaggucagucucag

SEQ ID NO: 4111 - RNA, 22 nt, Artificial Sequence
  Description of Artificial Sequence: Synthetic oligonucleotide
cuuuaguaaggucagucucagu

SEQ ID NO: 4112 - RNA, 22 nt, Artificial Sequence
  Description of Artificial Sequence: Synthetic oligonucleotide
uuuaguaaggucagucucaguc

SEQ ID NO: 4113 - RNA, 22 nt, Artificial Sequence
  Description of Artificial Sequence: Synthetic oligonucleotide
uaagaaagcguucgugauguag

SEQ ID NO: 4114 - RNA, 22 nt, Artificial Sequence
  Description of Artificial Sequence: Synthetic oligonucleotide
auaagaaagcguucgugaugua

SEQ ID NO: 4115 - RNA, 22 nt, Artificial Sequence
  Description of Artificial Sequence: Synthetic oligonucleotide
aaagcguucgugauguagcaac

SEQ ID NO: 4116 - RNA, 22 nt, Artificial Sequence
  Description of Artificial Sequence: Synthetic oligonucleotide
gaaagcguucgugauguagcaa

SEQ ID NO: 4117 - RNA, 22 nt, Artificial Sequence
  Description of Artificial Sequence: Synthetic oligonucleotide
agaaagcguucgugauguagca

SEQ ID NO: 4118 - RNA, 22 nt, Artificial Sequence
  Description of Artificial Sequence: Synthetic oligonucleotide
aagaaagcguucgugauguagc

SEQ ID NO: 4119 - RNA, 22 nt, Artificial Sequence
  Description of Artificial Sequence: Synthetic oligonucleotide
cguucgugauguagcaacagug

SEQ ID NO: 4120 - RNA, 22 nt, Artificial Sequence
  Description of Artificial Sequence: Synthetic oligonucleotide
gcguucgugauguagcaacagu

SEQ ID NO: 4121 - RNA, 22 nt, Artificial Sequence
  Description of Artificial Sequence: Synthetic oligonucleotide
agcguucgugauguagcaacag

SEQ ID NO: 4122 - RNA, 22 nt, Artificial Sequence
  Description of Artificial Sequence: Synthetic oligonucleotide
aagcguucgugauguagcaaca

SEQ ID NO: 4123 - RNA, 22 nt, Artificial Sequence
  Description of Artificial Sequence: Synthetic oligonucleotide
gcgcaguaaggauggcuagugu

SEQ ID NO: 4124 - RNA, 22 nt, Artificial Sequence
  Description of Artificial Sequence: Synthetic oligonucleotide
cgcaguaaggauggcuagugua

SEQ ID NO: 4125 - RNA, 22 nt, Artificial Sequence
  Description of Artificial Sequence: Synthetic oligonucleotide
aguaaggauggcuaguguaacu

SEQ ID NO: 4126 - RNA, 22 nt, Artificial Sequence
  Description of Artificial Sequence: Synthetic oligonucleotide
guaaggauggcuaguguaacua

SEQ ID NO: 4127 - RNA, 22 nt, Artificial Sequence
  Description of Artificial Sequence: Synthetic oligonucleotide
gcaguaaggauggcuaguguaa

SEQ ID NO: 4128 - RNA, 22 nt, Artificial Sequence
  Description of Artificial Sequence: Synthetic oligonucleotide
caguaaggauggcuaguguaac

SEQ ID NO: 4129 - RNA, 22 nt, Artificial Sequence
  Description of Artificial Sequence: Synthetic oligonucleotide
aggauggcuaguguaacuagca

SEQ ID NO: 4130 - RNA, 22 nt, Artificial Sequence
  Description of Artificial Sequence: Synthetic oligonucleotide
ggauggcuaguguaacuagcaa

SEQ ID NO: 4131 - RNA, 22 nt, Artificial Sequence
  Description of Artificial Sequence: Synthetic oligonucleotide
uaaggauggcuaguguaacuag

SEQ ID NO: 4132 - RNA, 22 nt, Artificial Sequence
  Description of Artificial Sequence: Synthetic oligonucleotide
aaggauggcuaguguaacuagc

SEQ ID NO: 4133 - RNA, 22 nt, Artificial Sequence
  Description of Artificial Sequence: Synthetic oligonucleotide
uguccucagaucuagccuguuu

SEQ ID NO: 4134 - RNA, 22 nt, Artificial Sequence
  Description of Artificial Sequence: Synthetic oligonucleotide
uuguccucagaucuagccuguu

SEQ ID NO: 4135 - RNA, 22 nt, Artificial Sequence
  Description of Artificial Sequence: Synthetic oligonucleotide
ugacgugauauaugugguacca

SEQ ID NO: 4136 - RNA, 22 nt, Artificial Sequence
  Description of Artificial Sequence: Synthetic oligonucleotide
gacgugauauaugugguaccau

SEQ ID NO: 4137 - RNA, 22 nt, Artificial Sequence
  Description of Artificial Sequence: Synthetic oligonucleotide
acgugauauaugugguaccaug

SEQ ID NO: 4138 - RNA, 22 nt, Artificial Sequence
  Description of Artificial Sequence: Synthetic oligonucleotide
cgugauauaugugguaccaugu

SEQ ID NO: 4139 - RNA, 22 nt, Artificial Sequence
  Description of Artificial Sequence: Synthetic oligonucleotide
acguugacgugauauauguggu

SEQ ID NO: 4140 - RNA, 22 nt, Artificial Sequence
  Description of Artificial Sequence: Synthetic oligonucleotide
cguugacgugauauauguggua

SEQ ID NO: 4141 - RNA, 22 nt, Artificial Sequence
  Description of Artificial Sequence: Synthetic oligonucleotide
guugacgugauauaugugguac

SEQ ID NO: 4142 - RNA, 22 nt, Artificial Sequence
  Description of Artificial Sequence: Synthetic oligonucleotide
uugacgugauauaugugguacc

SEQ ID NO: 4143 - RNA, 22 nt, Artificial Sequence
  Description of Artificial Sequence: Synthetic oligonucleotide
agacguugacgugauauaugug

SEQ ID NO: 4144 - RNA, 22 nt, Artificial Sequence
  Description of Artificial Sequence: Synthetic oligonucleotide
gacguugacgugauauaugugg

SEQ ID NO: 4145 - RNA, 22 nt, Artificial Sequence
  Description of Artificial Sequence: Synthetic oligonucleotide
guaagugcagcuacugaaaagc

SEQ ID NO: 4146 - RNA, 22 nt, Artificial Sequence
  Description of Artificial Sequence: Synthetic oligonucleotide
uaagugcagcuacugaaaagca

SEQ ID NO: 4147 - RNA, 22 nt, Artificial Sequence
  Description of Artificial Sequence: Synthetic oligonucleotide
uagaaguucaaaagaaaguacu

SEQ ID NO: 4148 - RNA, 22 nt, Artificial Sequence
  Description of Artificial Sequence: Synthetic oligonucleotide
ucuacaccacagaaaacuccug

SEQ ID NO: 4149 - RNA, 22 nt, Artificial Sequence
  Description of Artificial Sequence: Synthetic oligonucleotide
aucuacaccacagaaaacuccu

SEQ ID NO: 4150 - RNA, 22 nt, Artificial Sequence
  Description of Artificial Sequence: Synthetic oligonucleotide
caucuacaccacagaaaacucc

SEQ ID NO: 4151 - RNA, 22 nt, Artificial Sequence
  Description of Artificial Sequence: Synthetic oligonucleotide
gcaucuacaccacagaaaacuc

SEQ ID NO: 4152 - RNA, 22 nt, Artificial Sequence
  Description of Artificial Sequence: Synthetic oligonucleotide
cacacauaucuaaaacggcaau

SEQ ID NO: 4153 - RNA, 22 nt, Artificial Sequence
  Description of Artificial Sequence: Synthetic oligonucleotide
acacauaucuaaaacggcaauu

SEQ ID NO: 4154 - RNA, 22 nt, Artificial Sequence
  Description of Artificial Sequence: Synthetic oligonucleotide
agcacacauaucuaaaacggca

SEQ ID NO: 4155 - RNA, 22 nt, Artificial Sequence
  Description of Artificial Sequence: Synthetic oligonucleotide
uggaagcgacaacaauuaguuu

SEQ ID NO: 4156 - RNA, 22 nt, Artificial Sequence
  Description of Artificial Sequence: Synthetic oligonucleotide
cacauaucuaaaacggcaauuc

SEQ ID NO: 4157 - RNA, 22 nt, Artificial Sequence
  Description of Artificial Sequence: Synthetic oligonucleotide
uuuaggugugucuguaacaaac

SEQ ID NO: 4158 - RNA, 22 nt, Artificial Sequence
  Description of Artificial Sequence: Synthetic oligonucleotide
cuuuaggugugucuguaacaaa

SEQ ID NO: 4159 - RNA, 22 nt, Artificial Sequence
  Description of Artificial Sequence: Synthetic oligonucleotide
uaggugugucuguaacaaaccu

SEQ ID NO: 4160 - RNA, 22 nt, Artificial Sequence
  Description of Artificial Sequence: Synthetic oligonucleotide
uuaggugugucuguaacaaacc

SEQ ID NO: 4161 - RNA, 22 nt, Artificial Sequence
  Description of Artificial Sequence: Synthetic oligonucleotide
ccuuuaggugugucuguaacaa

SEQ ID NO: 4162 - RNA, 22 nt, Artificial Sequence
  Description of Artificial Sequence: Synthetic oligonucleotide
cagagguuauaaguaucaaauu

SEQ ID NO: 4163 - RNA, 22 nt, Artificial Sequence
  Description of Artificial Sequence: Synthetic oligonucleotide
ccagagguuauaaguaucaaau

SEQ ID NO: 4164 - RNA, 22 nt, Artificial Sequence
  Description of Artificial Sequence: Synthetic oligonucleotide
uccagagguuauaaguaucaaa

SEQ ID NO: 4165 - RNA, 22 nt, Artificial Sequence
  Description of Artificial Sequence: Synthetic oligonucleotide
uuccagagguuauaaguaucaa

SEQ ID NO: 4166 - RNA, 22 nt, Artificial Sequence
  Description of Artificial Sequence: Synthetic oligonucleotide
gguuauaaguaucaaauuguuu

SEQ ID NO: 4167 - RNA, 22 nt, Artificial Sequence
  Description of Artificial Sequence: Synthetic oligonucleotide
agguuauaaguaucaaauuguu

SEQ ID NO: 4168 - RNA, 22 nt, Artificial Sequence
  Description of Artificial Sequence: Synthetic oligonucleotide
gagguuauaaguaucaaauugu

SEQ ID NO: 4169 - RNA, 22 nt, Artificial Sequence
  Description of Artificial Sequence: Synthetic oligonucleotide
agagguuauaaguaucaaauug

SEQ ID NO: 4170 - RNA, 22 nt, Artificial Sequence
  Description of Artificial Sequence: Synthetic oligonucleotide
gucauaguacuacagauagaga

SEQ ID NO: 4171 - RNA, 22 nt, Artificial Sequence
  Description of Artificial Sequence: Synthetic oligonucleotide
ucauaguacuacagauagagac

SEQ ID NO: 4172 - RNA, 22 nt, Artificial Sequence
  Description of Artificial Sequence: Synthetic oligonucleotide
guacuacagauagagacaccag

SEQ ID NO: 4173 - RNA, 22 nt, Artificial Sequence
  Description of Artificial Sequence: Synthetic oligonucleotide
uacuacagauagagacaccagc

SEQ ID NO: 4174 - RNA, 22 nt, Artificial Sequence
  Description of Artificial Sequence: Synthetic oligonucleotide
acuacagauagagacaccagcu

SEQ ID NO: 4175 - RNA, 22 nt, Artificial Sequence
  Description of Artificial Sequence: Synthetic oligonucleotide
cuacagauagagacaccagcua

SEQ ID NO: 4176 - RNA, 22 nt, Artificial Sequence
  Description of Artificial Sequence: Synthetic oligonucleotide
cauaguacuacagauagagaca

SEQ ID NO: 4177 - RNA, 22 nt, Artificial Sequence
  Description of Artificial Sequence: Synthetic oligonucleotide
auaguacuacagauagagacac

SEQ ID NO: 4178 - RNA, 22 nt, Artificial Sequence
  Description of Artificial Sequence: Synthetic oligonucleotide
uaguacuacagauagagacacc

SEQ ID NO: 4179 - RNA, 22 nt, Artificial Sequence
  Description of Artificial Sequence: Synthetic oligonucleotide
aguacuacagauagagacacca

SEQ ID NO: 4180 - RNA, 22 nt, Artificial Sequence
  Description of Artificial Sequence: Synthetic oligonucleotide
gcacgcuaguagucgucgucgg

SEQ ID NO: 4181 - RNA, 22 nt, Artificial Sequence
  Description of Artificial Sequence: Synthetic oligonucleotide
ggcacgcuaguagucgucgucg

SEQ ID NO: 4182 - RNA, 22 nt, Artificial Sequence
  Description of Artificial Sequence: Synthetic oligonucleotide
guagucgucgucgguucaucau

SEQ ID NO: 4183 - RNA, 22 nt, Artificial Sequence
  Description of Artificial Sequence: Synthetic oligonucleotide
aguagucgucgucgguucauca

SEQ ID NO: 4184 - RNA, 22 nt, Artificial Sequence
  Description of Artificial Sequence: Synthetic oligonucleotide
uaguagucgucgucgguucauc

SEQ ID NO: 4185 - RNA, 22 nt, Artificial Sequence
  Description of Artificial Sequence: Synthetic oligonucleotide
cuaguagucgucgucgguucau

SEQ ID NO: 4186 - RNA, 22 nt, Artificial Sequence
  Description of Artificial Sequence: Synthetic oligonucleotide
gcuaguagucgucgucgguuca

SEQ ID NO: 4187 - RNA, 22 nt, Artificial Sequence
  Description of Artificial Sequence: Synthetic oligonucleotide
cgcuaguagucgucgucgguuc

SEQ ID NO: 4188 - RNA, 22 nt, Artificial Sequence
  Description of Artificial Sequence: Synthetic oligonucleotide
acgcuaguagucgucgucgguu

SEQ ID NO: 4189 - RNA, 22 nt, Artificial Sequence
  Description of Artificial Sequence: Synthetic oligonucleotide
cacgcuaguagucgucgucggu

SEQ ID NO: 4190 - RNA, 22 nt, Artificial Sequence
  Description of Artificial Sequence: Synthetic oligonucleotide
uauugaaauaaucaucaucaca

SEQ ID NO: 4191 - RNA, 22 nt, Artificial Sequence
  Description of Artificial Sequence: Synthetic oligonucleotide
aaauaaucaucaucacaacaau

SEQ ID NO: 4192 - RNA, 22 nt, Artificial Sequence
  Description of Artificial Sequence: Synthetic oligonucleotide
gaaauaaucaucaucacaacaa

SEQ ID NO: 4193 - RNA, 22 nt, Artificial Sequence
  Description of Artificial Sequence: Synthetic oligonucleotide
ugaaauaaucaucaucacaaca

SEQ ID NO: 4194 - RNA, 22 nt, Artificial Sequence
  Description of Artificial Sequence: Synthetic oligonucleotide
aaucaucaucacaacaauugua

SEQ ID NO: 4195 - RNA, 22 nt, Artificial Sequence
  Description of Artificial Sequence: Synthetic oligonucleotide
uaaucaucaucacaacaauugu

SEQ ID NO: 4196 - RNA, 22 nt, Artificial Sequence
  Description of Artificial Sequence: Synthetic oligonucleotide
auaaucaucaucacaacaauug

SEQ ID NO: 4197 - RNA, 22 nt, Artificial Sequence
  Description of Artificial Sequence: Synthetic oligonucleotide
aauaaucaucaucacaacaauu

SEQ ID NO: 4198 - RNA, 22 nt, Artificial Sequence
  Description of Artificial Sequence: Synthetic oligonucleotide
cugauaucacacauuguuggua

SEQ ID NO: 4199 - RNA, 22 nt, Artificial Sequence
  Description of Artificial Sequence: Synthetic oligonucleotide
ucugauaucacacauuguuggu

SEQ ID NO: 4200 - RNA, 22 nt, Artificial Sequence
  Description of Artificial Sequence: Synthetic oligonucleotide
ucacacauuguugguagauuau

SEQ ID NO: 4201 - RNA, 22 nt, Artificial Sequence
  Description of Artificial Sequence: Synthetic oligonucleotide
aucacacauuguugguagauua

SEQ ID NO: 4202 - RNA, 22 nt, Artificial Sequence
  Description of Artificial Sequence: Synthetic oligonucleotide
acacauuguugguagauuauaa

SEQ ID NO: 4203 - RNA, 22 nt, Artificial Sequence
  Description of Artificial Sequence: Synthetic oligonucleotide
cacacauuguugguagauuaua

SEQ ID NO: 4204 - RNA, 22 nt, Artificial Sequence
  Description of Artificial Sequence: Synthetic oligonucleotide
gauaucacacauuguugguaga

SEQ ID NO: 4205 - RNA, 22 nt, Artificial Sequence
  Description of Artificial Sequence: Synthetic oligonucleotide
ugauaucacacauuguugguag

SEQ ID NO: 4206 - RNA, 22 nt, Artificial Sequence
  Description of Artificial Sequence: Synthetic oligonucleotide
uaucacacauuguugguagauu

SEQ ID NO: 4207 - RNA, 22 nt, Artificial Sequence
  Description of Artificial Sequence: Synthetic oligonucleotide
auaucacacauuguugguagau

SEQ ID NO: 4208 - RNA, 22 nt, Artificial Sequence
  Description of Artificial Sequence: Synthetic oligonucleotide
accagcuacggugcgagcucua

SEQ ID NO: 4209 - RNA, 22 nt, Artificial Sequence
  Description of Artificial Sequence: Synthetic oligonucleotide
caccagcuacggugcgagcucu

SEQ ID NO: 4210 - RNA, 22 nt, Artificial Sequence
  Description of Artificial Sequence: Synthetic oligonucleotide
cagcuacggugcgagcucuauu

SEQ ID NO: 4211 - RNA, 22 nt, Artificial Sequence
  Description of Artificial Sequence: Synthetic oligonucleotide
ccagcuacggugcgagcucuau

SEQ ID NO: 4212 - RNA, 22 nt, Artificial Sequence
  Description of Artificial Sequence: Synthetic oligonucleotide
gcuacggugcgagcucuauucu

SEQ ID NO: 4213 - RNA, 22 nt, Artificial Sequence
  Description of Artificial Sequence: Synthetic oligonucleotide
agcuacggugcgagcucuauuc

SEQ ID NO: 4214 - RNA, 22 nt, Artificial Sequence
  Description of Artificial Sequence: Synthetic oligonucleotide
uacggugcgagcucuauucuuu

SEQ ID NO: 4215 - RNA, 22 nt, Artificial Sequence
  Description of Artificial Sequence: Synthetic oligonucleotide
cuacggugcgagcucuauucuu

SEQ ID NO: 4216 - RNA, 22 nt, Artificial Sequence
  Description of Artificial Sequence: Synthetic oligonucleotide
acaccagcuacggugcgagcuc

SEQ ID NO: 4217 - RNA, 22 nt, Artificial Sequence
  Description of Artificial Sequence: Synthetic oligonucleotide
gacaccagcuacggugcgagcu

SEQ ID NO: 4218 - RNA, 22 nt, Artificial Sequence
  Description of Artificial Sequence: Synthetic oligonucleotide
gaaccuguuugcgcaucuguua

SEQ ID NO: 4219 - RNA, 22 nt, Artificial Sequence
  Description of Artificial Sequence: Synthetic oligonucleotide
ugaaccuguuugcgcaucuguu

SEQ ID NO: 4220 - RNA, 22 nt, Artificial Sequence
  Description of Artificial Sequence: Synthetic oligonucleotide
accuguuugcgcaucuguuaug

SEQ ID NO: 4221 - RNA, 22 nt, Artificial Sequence
  Description of Artificial Sequence: Synthetic oligonucleotide
agaugaaccuguuugcgcaucu

SEQ ID NO: 4222 - RNA, 22 nt, Artificial Sequence
  Description of Artificial Sequence: Synthetic oligonucleotide
uagaugaaccuguuugcgcauc

SEQ ID NO: 4223 - RNA, 22 nt, Artificial Sequence
  Description of Artificial Sequence: Synthetic oligonucleotide
augaaccuguuugcgcaucugu

SEQ ID NO: 4224 - RNA, 22 nt, Artificial Sequence
  Description of Artificial Sequence: Synthetic oligonucleotide
gaugaaccuguuugcgcaucug

SEQ ID NO: 4225 - RNA, 22 nt, Artificial Sequence
  Description of Artificial Sequence: Synthetic oligonucleotide
aacaugucuggaccuauaguuu

SEQ ID NO: 4226 - RNA, 22 nt, Artificial Sequence
  Description of Artificial Sequence: Synthetic oligonucleotide
uuucauaagucuacacacugaa

SEQ ID NO: 4227 - RNA, 22 nt, Artificial Sequence
  Description of Artificial Sequence: Synthetic oligonucleotide
uucauaagucuacacacugaau

SEQ ID NO: 4228 - RNA, 22 nt, Artificial Sequence
  Description of Artificial Sequence: Synthetic oligonucleotide
caaaacuuguaggugggaacac

SEQ ID NO: 4229 - RNA, 22 nt, Artificial Sequence
  Description of Artificial Sequence: Synthetic oligonucleotide
guccaaaacuuguaggugggaa

SEQ ID NO: 4230 - RNA, 22 nt, Artificial Sequence
  Description of Artificial Sequence: Synthetic oligonucleotide
uccaaaacuuguaggugggaac

SEQ ID NO: 4231 - RNA, 22 nt, Artificial Sequence
  Description of Artificial Sequence: Synthetic oligonucleotide
ucauuagguuucuuaauaguaa

SEQ ID NO: 4232 - RNA, 22 nt, Artificial Sequence
  Description of Artificial Sequence: Synthetic oligonucleotide
auugcagcaguacgcacacaau

SEQ ID NO: 4233 - RNA, 22 nt, Artificial Sequence
  Description of Artificial Sequence: Synthetic oligonucleotide
aaaaacuauaacauuaauaggc

SEQ ID NO: 4234 - RNA, 22 nt, Artificial Sequence
  Description of Artificial Sequence: Synthetic oligonucleotide
caaaaacuauaacauuaauagg

SEQ ID NO: 4235 - RNA, 22 nt, Artificial Sequence
  Description of Artificial Sequence: Synthetic oligonucleotide
ucaaaaacuauaacauuaauag

SEQ ID NO: 4236 - RNA, 22 nt, Artificial Sequence
  Description of Artificial Sequence: Synthetic oligonucleotide
aucaaaaacuauaacauuaaua

SEQ ID NO: 4237 - RNA, 22 nt, Artificial Sequence
  Description of Artificial Sequence: Synthetic oligonucleotide
aaaacuauaacauuaauaggca

SEQ ID NO: 4238 - RNA, 22 nt, Artificial Sequence
  Description of Artificial Sequence: Synthetic oligonucleotide
caucaaaaacuauaacauuaau

SEQ ID NO: 4239 - RNA, 22 nt, Artificial Sequence
  Description of Artificial Sequence: Synthetic oligonucleotide
ccaucaaaaacuauaacauuaa

SEQ ID NO: 4240 - RNA, 22 nt, Artificial Sequence
  Description of Artificial Sequence: Synthetic oligonucleotide
accuuuccacauaccgcagacg

SEQ ID NO: 4241 - RNA, 22 nt, Artificial Sequence
  Description of Artificial Sequence: Synthetic oligonucleotide
uaaccuuuccacauaccgcaga

SEQ ID NO: 4242 - RNA, 22 nt, Artificial Sequence
  Description of Artificial Sequence: Synthetic oligonucleotide
aucaucauugagaaauguuuac

SEQ ID NO: 4243 - RNA, 22 nt, Artificial Sequence
  Description of Artificial Sequence: Synthetic oligonucleotide
caucauugagaaauguuuacgc

SEQ ID NO: 4244 - RNA, 22 nt, Artificial Sequence
  Description of Artificial Sequence: Synthetic oligonucleotide
ucaucauugagaaauguuuacg

SEQ ID NO: 4245 - RNA, 22 nt, Artificial Sequence
  Description of Artificial Sequence: Synthetic oligonucleotide
ucagaaccagcaccaaaaugua

SEQ ID NO: 4246 - RNA, 22 nt, Artificial Sequence
  Description of Artificial Sequence: Synthetic oligonucleotide
aaccagcaccaaaauguauaac

SEQ ID NO: 4247 - RNA, 22 nt, Artificial Sequence
  Description of Artificial Sequence: Synthetic oligonucleotide
acugcugccuggaguugaauuu

SEQ ID NO: 4248 - RNA, 22 nt, Artificial Sequence
  Description of Artificial Sequence: Synthetic oligonucleotide
uacugcugccuggaguugaauu

SEQ ID NO: 4249 - RNA, 22 nt, Artificial Sequence
  Description of Artificial Sequence: Synthetic oligonucleotide
ugcugccuggaguugaauuucu

SEQ ID NO: 4250 - RNA, 22 nt, Artificial Sequence
  Description of Artificial Sequence: Synthetic oligonucleotide
cugcugccuggaguugaauuuc

SEQ ID NO: 4251 - RNA, 22 nt, Artificial Sequence
  Description of Artificial Sequence: Synthetic oligonucleotide
cccuacugcugccuggaguuga

SEQ ID NO: 4252 - RNA, 22 nt, Artificial Sequence
  Description of Artificial Sequence: Synthetic oligonucleotide
ccccuacugcugccuggaguug

SEQ ID NO: 4253 - RNA, 22 nt, Artificial Sequence
  Description of Artificial Sequence: Synthetic oligonucleotide
gaacagaucuacaagagaucga

SEQ ID NO: 4254 - RNA, 22 nt, Artificial Sequence
  Description of Artificial Sequence: Synthetic oligonucleotide
agaacagaucuacaagagaucg

SEQ ID NO: 4255 - RNA, 22 nt, Artificial Sequence
  Description of Artificial Sequence: Synthetic oligonucleotide
gagaacagaucuacaagagauc

SEQ ID NO: 4256 - RNA, 22 nt, Artificial Sequence
  Description of Artificial Sequence: Synthetic oligonucleotide
agagaacagaucuacaagagau

SEQ ID NO: 4257 - RNA, 22 nt, Artificial Sequence
  Description of Artificial Sequence: Synthetic oligonucleotide
uagagaacagaucuacaagaga

SEQ ID NO: 4258 - RNA, 22 nt, Artificial Sequence
  Description of Artificial Sequence: Synthetic oligonucleotide
uuagagaacagaucuacaagag

SEQ ID NO: 4259 - RNA, 22 nt, Artificial Sequence
  Description of Artificial Sequence: Synthetic oligonucleotide
uuuagagaacagaucuacaaga

SEQ ID NO: 4260 - RNA, 22 nt, Artificial Sequence
  Description of Artificial Sequence: Synthetic oligonucleotide
guuuagagaacagaucuacaag

SEQ ID NO: 4261 - RNA, 22 nt, Artificial Sequence
  Description of Artificial Sequence: Synthetic oligonucleotide
cguuuagagaacagaucuacaa

SEQ ID NO: 4262 - RNA, 22 nt, Artificial Sequence
  Description of Artificial Sequence: Synthetic oligonucleotide
ucguuuagagaacagaucuaca

SEQ ID NO: 4263 - RNA, 22 nt, Artificial Sequence
  Description of Artificial Sequence: Synthetic oligonucleotide
auucucuuaccacgccuauuug

SEQ ID NO: 4264 - RNA, 22 nt, Artificial Sequence
  Description of Artificial Sequence: Synthetic oligonucleotide
aauucucuuaccacgccuauuu

SEQ ID NO: 4265 - RNA, 22 nt, Artificial Sequence
  Description of Artificial Sequence: Synthetic oligonucleotide
auuuauaauuauaaucagcaau

SEQ ID NO: 4266 - RNA, 22 nt, Artificial Sequence
  Description of Artificial Sequence: Synthetic oligonucleotide
uuuauaauuauaaucagcaauc

SEQ ID NO: 4267 - RNA, 22 nt, Artificial Sequence
  Description of Artificial Sequence: Synthetic oligonucleotide
gcaauuccaguuugagcagaaa

SEQ ID NO: 4268 - RNA, 22 nt, Artificial Sequence
  Description of Artificial Sequence: Synthetic oligonucleotide
ggcaauuccaguuugagcagaa

SEQ ID NO: 4269 - RNA, 22 nt, Artificial Sequence
  Description of Artificial Sequence: Synthetic oligonucleotide
ccaguuugagcagaaagagguc

SEQ ID NO: 4270 - RNA, 22 nt, Artificial Sequence
  Description of Artificial Sequence: Synthetic oligonucleotide
uccaguuugagcagaaagaggu

SEQ ID NO: 4271 - RNA, 22 nt, Artificial Sequence
  Description of Artificial Sequence: Synthetic oligonucleotide
caguuugagcagaaagaggucc

SEQ ID NO: 4272 - RNA, 22 nt, Artificial Sequence
  Description of Artificial Sequence: Synthetic oligonucleotide
aauuccaguuugagcagaaaga

SEQ ID NO: 4273 - RNA, 22 nt, Artificial Sequence
  Description of Artificial Sequence: Synthetic oligonucleotide
caauuccaguuugagcagaaag

SEQ ID NO: 4274 - RNA, 22 nt, Artificial Sequence
  Description of Artificial Sequence: Synthetic oligonucleotide
uuccaguuugagcagaaagagg

SEQ ID NO: 4275 - RNA, 22 nt, Artificial Sequence
  Description of Artificial Sequence: Synthetic oligonucleotide
auuccaguuugagcagaaagag

SEQ ID NO: 4276 - RNA, 22 nt, Artificial Sequence
  Description of Artificial Sequence: Synthetic oligonucleotide
gugccugugccgcacgguguaa

SEQ ID NO: 4277 - RNA, 22 nt, Artificial Sequence
  Description of Artificial Sequence: Synthetic oligonucleotide
ugccugugccgcacgguguaag

SEQ ID NO: 4278 - RNA, 22 nt, Artificial Sequence
  Description of Artificial Sequence: Synthetic oligonucleotide
cugugccgcacgguguaagacg

SEQ ID NO: 4279 - RNA, 22 nt, Artificial Sequence
  Description of Artificial Sequence: Synthetic oligonucleotide
ugugccgcacgguguaagacgg

SEQ ID NO: 4280 - RNA, 22 nt, Artificial Sequence
  Description of Artificial Sequence: Synthetic oligonucleotide
gccugugccgcacgguguaaga

SEQ ID NO: 4281 - RNA, 22 nt, Artificial Sequence
  Description of Artificial Sequence: Synthetic oligonucleotide
ccugugccgcacgguguaagac

SEQ ID NO: 4282 - RNA, 22 nt, Artificial Sequence
  Description of Artificial Sequence: Synthetic oligonucleotide
gccgcacgguguaagacgggcu

SEQ ID NO: 4283 - RNA, 22 nt, Artificial Sequence
  Description of Artificial Sequence: Synthetic oligonucleotide
ccgcacgguguaagacgggcug

SEQ ID NO: 4284 - RNA, 22 nt, Artificial Sequence
  Description of Artificial Sequence: Synthetic oligonucleotide
gugccgcacgguguaagacggg

SEQ ID NO: 4285 - RNA, 22 nt, Artificial Sequence
  Description of Artificial Sequence: Synthetic oligonucleotide
ugccgcacgguguaagacgggc

SEQ ID NO: 4286 - RNA, 22 nt, Artificial Sequence
  Description of Artificial Sequence: Synthetic oligonucleotide
aaagcucaaaugcuacauuaac

SEQ ID NO: 4287 - RNA, 22 nt, Artificial Sequence
  Description of Artificial Sequence: Synthetic oligonucleotide
caaagcucaaaugcuacauuaa

SEQ ID NO: 4288 - RNA, 22 nt, Artificial Sequence
  Description of Artificial Sequence: Synthetic oligonucleotide
agcucaaaugcuacauuaacag

SEQ ID NO: 4289 - RNA, 22 nt, Artificial Sequence
  Description of Artificial Sequence: Synthetic oligonucleotide
aagcucaaaugcuacauuaaca

SEQ ID NO: 4290 - RNA, 22 nt, Artificial Sequence
  Description of Artificial Sequence: Synthetic oligonucleotide
gcucaaaugcuacauuaacagg

SEQ ID NO: 4291 - RNA, 22 nt, Artificial Sequence
  Description of Artificial Sequence: Synthetic oligonucleotide
gcaacauugcuagaaaacucau

SEQ ID NO: 4292 - RNA, 22 nt, Artificial Sequence
  Description of Artificial Sequence: Synthetic oligonucleotide
ugcaacauugcuagaaaacuca

SEQ ID NO: 4293 - RNA, 22 nt, Artificial Sequence
  Description of Artificial Sequence: Synthetic oligonucleotide
aacauugcuagaaaacucaucu

SEQ ID NO: 4294 - RNA, 22 nt, Artificial Sequence
  Description of Artificial Sequence: Synthetic oligonucleotide
caacauugcuagaaaacucauc

SEQ ID NO: 4295 - RNA, 22 nt, Artificial Sequence
  Description of Artificial Sequence: Synthetic oligonucleotide
cauugcuagaaaacucaucuga

SEQ ID NO: 4296 - RNA, 22 nt, Artificial Sequence
  Description of Artificial Sequence: Synthetic oligonucleotide
acauugcuagaaaacucaucug

SEQ ID NO: 4297 - RNA, 22 nt, Artificial Sequence
  Description of Artificial Sequence: Synthetic oligonucleotide
uugcuagaaaacucaucugaga

SEQ ID NO: 4298 - RNA, 22 nt, Artificial Sequence
  Description of Artificial Sequence: Synthetic oligonucleotide
auugcuagaaaacucaucugag

SEQ ID NO: 4299 - RNA, 22 nt, Artificial Sequence
  Description of Artificial Sequence: Synthetic oligonucleotide
gcuagaaaacucaucugagaua

SEQ ID NO: 4300 - RNA, 22 nt, Artificial Sequence
  Description of Artificial Sequence: Synthetic oligonucleotide
ugcuagaaaacucaucugagau

SEQ ID NO: 4301 - RNA, 22 nt, Artificial Sequence
  Description of Artificial Sequence: Synthetic oligonucleotide
uaaguggguaagcaucuauagc

SEQ ID NO: 4302 - RNA, 22 nt, Artificial Sequence
  Description of Artificial Sequence: Synthetic oligonucleotide
guaaguggguaagcaucuauag

SEQ ID NO: 4303 - RNA, 22 nt, Artificial Sequence
  Description of Artificial Sequence: Synthetic oligonucleotide
auaauaaagucuagccuuaccc

SEQ ID NO: 4304 - RNA, 22 nt, Artificial Sequence
  Description of Artificial Sequence: Synthetic oligonucleotide
cauaauaaagucuagccuuacc

SEQ ID NO: 4305 - RNA, 22 nt, Artificial Sequence
  Description of Artificial Sequence: Synthetic oligonucleotide
aauaaagucuagccuuacccca

SEQ ID NO: 4306 - RNA, 22 nt, Artificial Sequence
  Description of Artificial Sequence: Synthetic oligonucleotide
uaauaaagucuagccuuacccc

SEQ ID NO: 4307 - RNA, 22 nt, Artificial Sequence
  Description of Artificial Sequence: Synthetic oligonucleotide
uaaagucuagccuuaccccauu

SEQ ID NO: 4308 - RNA, 22 nt, Artificial Sequence
  Description of Artificial Sequence: Synthetic oligonucleotide
auaaagucuagccuuaccccau

SEQ ID NO: 4309 - RNA, 22 nt, Artificial Sequence
  Description of Artificial Sequence: Synthetic oligonucleotide
aagucuagccuuaccccauuua

SEQ ID NO: 4310 - RNA, 22 nt, Artificial Sequence
  Description of Artificial Sequence: Synthetic oligonucleotide
aaagucuagccuuaccccauuu

SEQ ID NO: 4311 - RNA, 22 nt, Artificial Sequence
  Description of Artificial Sequence: Synthetic oligonucleotide
ucauaauaaagucuagccuuac

SEQ ID NO: 4312 - RNA, 22 nt, Artificial Sequence
  Description of Artificial Sequence: Synthetic oligonucleotide
uguaccuggugcaacuccuuua

SEQ ID NO: 4313 - RNA, 22 nt, Artificial Sequence
  Description of Artificial Sequence: Synthetic oligonucleotide
cuguaccuggugcaacuccuuu

SEQ ID NO: 4314 - RNA, 22 nt, Artificial Sequence
  Description of Artificial Sequence: Synthetic oligonucleotide
uaccuggugcaacuccuuuauc

SEQ ID NO: 4315 - RNA, 22 nt, Artificial Sequence
  Description of Artificial Sequence: Synthetic oligonucleotide
guaccuggugcaacuccuuuau

SEQ ID NO: 4316 - RNA, 22 nt, Artificial Sequence
  Description of Artificial Sequence: Synthetic oligonucleotide
ccuggugcaacuccuuuaucag

SEQ ID NO: 4317 - RNA, 22 nt, Artificial Sequence
  Description of Artificial Sequence: Synthetic oligonucleotide
accuggugcaacuccuuuauca

SEQ ID NO: 4318 - RNA, 22 nt, Artificial Sequence
  Description of Artificial Sequence: Synthetic oligonucleotide
uggugcaacuccuuuaucagaa

SEQ ID NO: 4319 - RNA, 22 nt, Artificial Sequence
  Description of Artificial Sequence: Synthetic oligonucleotide
cuggugcaacuccuuuaucaga

SEQ ID NO: 4320 - RNA, 22 nt, Artificial Sequence
  Description of Artificial Sequence: Synthetic oligonucleotide
gcuguaccuggugcaacuccuu

SEQ ID NO: 4321 - RNA, 22 nt, Artificial Sequence
  Description of Artificial Sequence: Synthetic oligonucleotide
gcgagcaagaacaagugaggcc

SEQ ID NO: 4322 - RNA, 22 nt, Artificial Sequence
  Description of Artificial Sequence: Synthetic oligonucleotide
ugcgagcaagaacaagugaggc

SEQ ID NO: 4323 - RNA, 22 nt, Artificial Sequence
  Description of Artificial Sequence: Synthetic oligonucleotide
gagcaagaacaagugaggccau

SEQ ID NO: 4324 - RNA, 22 nt, Artificial Sequence
  Description of Artificial Sequence: Synthetic oligonucleotide
cgagcaagaacaagugaggcca

SEQ ID NO: 4325 - RNA, 22 nt, Artificial Sequence
  Description of Artificial Sequence: Synthetic oligonucleotide
acaguacucagaaucaaaaguu

SEQ ID NO: 4326 - RNA, 22 nt, Artificial Sequence
  Description of Artificial Sequence: Synthetic oligonucleotide
caguacucagaaucaaaaguug

SEQ ID NO: 4327 - RNA, 22 nt, Artificial Sequence
  Description of Artificial Sequence: Synthetic oligonucleotide
uacucagaaucaaaaguuguua

SEQ ID NO: 4328 - RNA, 22 nt, Artificial Sequence
  Description of Artificial Sequence: Synthetic oligonucleotide
acucagaaucaaaaguuguuac

SEQ ID NO: 4329 - RNA, 22 nt, Artificial Sequence
  Description of Artificial Sequence: Synthetic oligonucleotide
aguacucagaaucaaaaguugu

SEQ ID NO: 4330 - RNA, 22 nt, Artificial Sequence
  Description of Artificial Sequence: Synthetic oligonucleotide
guacucagaaucaaaaguuguu

SEQ ID NO: 4331 - RNA, 22 nt, Artificial Sequence
  Description of Artificial Sequence: Synthetic oligonucleotide
accauuagcaacagccugcuca

SEQ ID NO: 4332 - RNA, 22 nt, Artificial Sequence
  Description of Artificial Sequence: Synthetic oligonucleotide
ccauuagcaacagccugcucau

SEQ ID NO: 4333 - RNA, 22 nt, Artificial Sequence
  Description of Artificial Sequence: Synthetic oligonucleotide
cauuagcaacagccugcucaua

SEQ ID NO: 4334 - RNA, 22 nt, Artificial Sequence
  Description of Artificial Sequence: Synthetic oligonucleotide
agugcaucuugauccucauaac

SEQ ID NO: 4335 - RNA, 22 nt, Artificial Sequence
  Description of Artificial Sequence: Synthetic oligonucleotide
aagugcaucuugauccucauaa

SEQ ID NO: 4336 - RNA, 22 nt, Artificial Sequence
  Description of Artificial Sequence: Synthetic oligonucleotide
ugcaucuugauccucauaacuc

SEQ ID NO: 4337 - RNA, 22 nt, Artificial Sequence
  Description of Artificial Sequence: Synthetic oligonucleotide
gugcaucuugauccucauaacu

SEQ ID NO: 4338 - RNA, 22 nt, Artificial Sequence
  Description of Artificial Sequence: Synthetic oligonucleotide
caucuugauccucauaacucau

SEQ ID NO: 4339 - RNA, 22 nt, Artificial Sequence
  Description of Artificial Sequence: Synthetic oligonucleotide
gcaucuugauccucauaacuca

SEQ ID NO: 4340 - RNA, 22 nt, Artificial Sequence
  Description of Artificial Sequence: Synthetic oligonucleotide
ucuugauccucauaacucauug

SEQ ID NO: 4341 - RNA, 22 nt, Artificial Sequence
  Description of Artificial Sequence: Synthetic oligonucleotide
aucuugauccucauaacucauu

SEQ ID NO: 4342 - RNA, 22 nt, Artificial Sequence
  Description of Artificial Sequence: Synthetic oligonucleotide
uugauccucauaacucauugaa

SEQ ID NO: 4343 - RNA, 22 nt, Artificial Sequence
  Description of Artificial Sequence: Synthetic oligonucleotide
cuugauccucauaacucauuga

SEQ ID NO: 4344 - RNA, 22 nt, Artificial Sequence
  Description of Artificial Sequence: Synthetic oligonucleotide
ugagugagagcggugaaccaag

SEQ ID NO: 4345 - RNA, 22 nt, Artificial Sequence
  Description of Artificial Sequence: Synthetic oligonucleotide
gagugagagcggugaaccaaga

SEQ ID NO: 4346 - RNA, 22 nt, Artificial Sequence
  Description of Artificial Sequence: Synthetic oligonucleotide
agugagagcggugaaccaagac

SEQ ID NO: 4347 - RNA, 22 nt, Artificial Sequence
  Description of Artificial Sequence: Synthetic oligonucleotide
gugagagcggugaaccaagacg

SEQ ID NO: 4348 - RNA, 22 nt, Artificial Sequence
  Description of Artificial Sequence: Synthetic oligonucleotide
ugauaauguuguugagugcauc

SEQ ID NO: 4349 - RNA, 22 nt, Artificial Sequence
  Description of Artificial Sequence: Synthetic oligonucleotide
uugauaauguuguugagugcau

SEQ ID NO: 4350 - RNA, 22 nt, Artificial Sequence
  Description of Artificial Sequence: Synthetic oligonucleotide
auaauguuguugagugcaucau

SEQ ID NO: 4351 - RNA, 22 nt, Artificial Sequence
  Description of Artificial Sequence: Synthetic oligonucleotide
gauaauguuguugagugcauca

SEQ ID NO: 4352 - RNA, 22 nt, Artificial Sequence
  Description of Artificial Sequence: Synthetic oligonucleotide
aauguuguugagugcaucauua

SEQ ID NO: 4353 - RNA, 22 nt, Artificial Sequence
  Description of Artificial Sequence: Synthetic oligonucleotide
uaauguuguugagugcaucauu

SEQ ID NO: 4354 - RNA, 22 nt, Artificial Sequence
  Description of Artificial Sequence: Synthetic oligonucleotide
uguuguugagugcaucauuauc

SEQ ID NO: 4355 - RNA, 22 nt, Artificial Sequence
  Description of Artificial Sequence: Synthetic oligonucleotide
auguuguugagugcaucauuau

SEQ ID NO: 4356 - RNA, 22 nt, Artificial Sequence
  Description of Artificial Sequence: Synthetic oligonucleotide
guugauaauguuguugagugca

SEQ ID NO: 4357 - RNA, 22 nt, Artificial Sequence
  Description of Artificial Sequence: Synthetic oligonucleotide
uguugauaauguuguugagugc

SEQ ID NO: 4358 - RNA, 22 nt, Artificial Sequence
  Description of Artificial Sequence: Synthetic oligonucleotide
ggugugacuuccaugccaaugc

SEQ ID NO: 4359 - RNA, 22 nt, Artificial Sequence
  Description of Artificial Sequence: Synthetic oligonucleotide
aggugugacuuccaugccaaug

SEQ ID NO: 4360 - RNA, 22 nt, Artificial Sequence
  Description of Artificial Sequence: Synthetic oligonucleotide
ugugacuuccaugccaaugcgc

SEQ ID NO: 4361 - RNA, 22 nt, Artificial Sequence
  Description of Artificial Sequence: Synthetic oligonucleotide
gugugacuuccaugccaaugcg

SEQ ID NO: 4362 - RNA, 22 nt, Artificial Sequence
  Description of Artificial Sequence: Synthetic oligonucleotide
cgaaggugugacuuccaugcca

SEQ ID NO: 4363 - RNA, 22 nt, Artificial Sequence
  Description of Artificial Sequence: Synthetic oligonucleotide
ccgaaggugugacuuccaugcc

SEQ ID NO: 4364 - RNA, 22 nt, Artificial Sequence
  Description of Artificial Sequence: Synthetic oligonucleotide
aaggugugacuuccaugccaau

SEQ ID NO: 4365 - RNA, 22 nt, Artificial Sequence
  Description of Artificial Sequence: Synthetic oligonucleotide
gaaggugugacuuccaugccaa

SEQ ID NO: 4366 - RNA, 22 nt, Artificial Sequence
  Description of Artificial Sequence: Synthetic oligonucleotide
cccgaaggugugacuuccaugc

SEQ ID NO: 4367 - RNA, 22 nt, Artificial Sequence
  Description of Artificial Sequence: Synthetic oligonucleotide
ucccgaaggugugacuuccaug

SEQ ID NO: 4368 - RNA, 22 nt, Artificial Sequence
  Description of Artificial Sequence: Synthetic oligonucleotide
gcuugacugccgccucugcucc

SEQ ID NO: 4369 - RNA, 22 nt, Artificial Sequence
  Description of Artificial Sequence: Synthetic oligonucleotide
guccccaaaauuuccuuggguu

SEQ ID NO: 4370 - RNA, 22 nt, Artificial Sequence
  Description of Artificial Sequence: Synthetic oligonucleotide
guacaagcaaagcaauauuguc

SEQ ID NO: 4371 - RNA, 22 nt, Artificial Sequence
  Description of Artificial Sequence: Synthetic oligonucleotide
acauuguucguuuaguuguuaa

SEQ ID NO: 4372 - RNA, 22 nt, Artificial Sequence
  Description of Artificial Sequence: Synthetic oligonucleotide
cauuguucguuuaguuguuaac

SEQ ID NO: 4373 - RNA, 22 nt, Artificial Sequence
  Description of Artificial Sequence: Synthetic oligonucleotide
auuguucguuuaguuguuaaca

SEQ ID NO: 4374 - RNA, 22 nt, Artificial Sequence
  Description of Artificial Sequence: Synthetic oligonucleotide
uuguucguuuaguuguuaacaa

SEQ ID NO: 4375 - RNA, 22 nt, Artificial Sequence
  Description of Artificial Sequence: Synthetic oligonucleotide
uguucguuuaguuguuaacaag

SEQ ID NO: 4376 - RNA, 22 nt, Artificial Sequence
  Description of Artificial Sequence: Synthetic oligonucleotide
guucguuuaguuguuaacaaga

SEQ ID NO: 4377 - RNA, 22 nt, Artificial Sequence
  Description of Artificial Sequence: Synthetic oligonucleotide
uucguuuaguuguuaacaagaa

SEQ ID NO: 4378 - RNA, 22 nt, Artificial Sequence
  Description of Artificial Sequence: Synthetic oligonucleotide
ucguuuaguuguuaacaagaac

SEQ ID NO: 4379 - RNA, 22 nt, Artificial Sequence
  Description of Artificial Sequence: Synthetic oligonucleotide
cguuuaguuguuaacaagaaca

SEQ ID NO: 4380 - RNA, 22 nt, Artificial Sequence
  Description of Artificial Sequence: Synthetic oligonucleotide
guuuaguuguuaacaagaacau

SEQ ID NO: 4381 - RNA, 22 nt, Artificial Sequence
  Description of Artificial Sequence: Synthetic oligonucleotide
aguuguuuaacaagcguguuua

SEQ ID NO: 4382 - RNA, 22 nt, Artificial Sequence
  Description of Artificial Sequence: Synthetic oligonucleotide
guuguuuaacaagcguguuuaa

SEQ ID NO: 4383 - RNA, 22 nt, Artificial Sequence
  Description of Artificial Sequence: Synthetic oligonucleotide
uaaguuguuuaacaagcguguu

SEQ ID NO: 4384 - RNA, 22 nt, Artificial Sequence
  Description of Artificial Sequence: Synthetic oligonucleotide
aaguuguuuaacaagcguguuu

SEQ ID NO: 4385 - RNA, 22 nt, Artificial Sequence
  Description of Artificial Sequence: Synthetic oligonucleotide
agcuaaguuguuuaacaagcgu

SEQ ID NO: 4386 - RNA, 22 nt, Artificial Sequence
  Description of Artificial Sequence: Synthetic oligonucleotide
uucuuagugacaguuuggccuu

SEQ ID NO: 4387 - RNA, 22 nt, Artificial Sequence
  Description of Artificial Sequence: Synthetic oligonucleotide
ucuuagugacaguuuggccuug

SEQ ID NO: 4388 - RNA, 22 nt, Artificial Sequence
  Description of Artificial Sequence: Synthetic oligonucleotide
cuuagugacaguuuggccuugu

SEQ ID NO: 4389 - RNA, 22 nt, Artificial Sequence
  Description of Artificial Sequence: Synthetic oligonucleotide
uuagugacaguuuggccuuguu

SEQ ID NO: 4390 - RNA, 22 nt, Artificial Sequence
  Description of Artificial Sequence: Synthetic oligonucleotide
agauuucuuagugacaguuugg

SEQ ID NO: 4391 - RNA, 22 nt, Artificial Sequence
  Description of Artificial Sequence: Synthetic oligonucleotide
gauuucuuagugacaguuuggc

SEQ ID NO: 4392 - RNA, 22 nt, Artificial Sequence
  Description of Artificial Sequence: Synthetic oligonucleotide
auuucuuagugacaguuuggcc

SEQ ID NO: 4393 - RNA, 22 nt, Artificial Sequence
  Description of Artificial Sequence: Synthetic oligonucleotide
uuucuuagugacaguuuggccu

SEQ ID NO: 4394 - RNA, 22 nt, Artificial Sequence
  Description of Artificial Sequence: Synthetic oligonucleotide
cagauuucuuagugacaguuug

SEQ ID NO: 4395 - RNA, 22 nt, Artificial Sequence
  Description of Artificial Sequence: Synthetic oligonucleotide
acgcaguauuauuggguaaacc

SEQ ID NO: 4396 - RNA, 22 nt, Artificial Sequence
  Description of Artificial Sequence: Synthetic oligonucleotide
cgcaguauuauuggguaaaccu

SEQ ID NO: 4397 - RNA, 22 nt, Artificial Sequence
  Description of Artificial Sequence: Synthetic oligonucleotide
agacgcaguauuauuggguaaa

SEQ ID NO: 4398 - RNA, 22 nt, Artificial Sequence
  Description of Artificial Sequence: Synthetic oligonucleotide
gacgcaguauuauuggguaaac

SEQ ID NO: 4399 - RNA, 22 nt, Artificial Sequence
  Description of Artificial Sequence: Synthetic oligonucleotide
aagacgcaguauuauuggguaa

SEQ ID NO: 4400 - RNA, 22 nt, Artificial Sequence
  Description of Artificial Sequence: Synthetic oligonucleotide
accaagacgcaguauuauuggg

SEQ ID NO: 4401 - RNA, 22 nt, Artificial Sequence
  Description of Artificial Sequence: Synthetic oligonucleotide
uacaaggugguuccaguucugu

SEQ ID NO: 4402 - RNA, 22 nt, Artificial Sequence
  Description of Artificial Sequence: Synthetic oligonucleotide
acaaggugguuccaguucugua

SEQ ID NO: 4403 - RNA, 22 nt, Artificial Sequence
  Description of Artificial Sequence: Synthetic oligonucleotide
caaggugguuccaguucuguau

SEQ ID NO: 4404 - RNA, 22 nt, Artificial Sequence
  Description of Artificial Sequence: Synthetic oligonucleotide
aaggugguuccaguucuguaua

SEQ ID NO: 4405 - RNA, 22 nt, Artificial Sequence
  Description of Artificial Sequence: Synthetic oligonucleotide
agcauuaauacagccaccaucg

SEQ ID NO: 4406 - RNA, 22 nt, Artificial Sequence
  Description of Artificial Sequence: Synthetic oligonucleotide
uagcauuaauacagccaccauc

SEQ ID NO: 4407 - RNA, 22 nt, Artificial Sequence
  Description of Artificial Sequence: Synthetic oligonucleotide
cauuaauacagccaccaucgua

SEQ ID NO: 4408 - RNA, 22 nt, Artificial Sequence
  Description of Artificial Sequence: Synthetic oligonucleotide
gcauuaauacagccaccaucgu

SEQ ID NO: 4409 - RNA, 22 nt, Artificial Sequence
  Description of Artificial Sequence: Synthetic oligonucleotide
uuaauacagccaccaucguaac

SEQ ID NO: 4410 - RNA, 22 nt, Artificial Sequence
  Description of Artificial Sequence: Synthetic oligonucleotide
auuaauacagccaccaucguaa

SEQ ID NO: 4411 - RNA, 22 nt, Artificial Sequence
  Description of Artificial Sequence: Synthetic oligonucleotide
aauacagccaccaucguaacaa

SEQ ID NO: 4412 - RNA, 22 nt, Artificial Sequence
  Description of Artificial Sequence: Synthetic oligonucleotide
uaauacagccaccaucguaaca

SEQ ID NO: 4413 - RNA, 22 nt, Artificial Sequence
  Description of Artificial Sequence: Synthetic oligonucleotide
uacagccaccaucguaacaauc

SEQ ID NO: 4414 - RNA, 22 nt, Artificial Sequence
  Description of Artificial Sequence: Synthetic oligonucleotide
auacagccaccaucguaacaau

SEQ ID NO: 4415 - RNA, 22 nt, Artificial Sequence
  Description of Artificial Sequence: Synthetic oligonucleotide
gcauuucaguagugccaccagc

SEQ ID NO: 4416 - RNA, 22 nt, Artificial Sequence
  Description of Artificial Sequence: Synthetic oligonucleotide
cauuucaguagugccaccagcc

SEQ ID NO: 4417 - RNA, 22 nt, Artificial Sequence
  Description of Artificial Sequence: Synthetic oligonucleotide
auuucaguagugccaccagccu

SEQ ID NO: 4418 - RNA, 22 nt, Artificial Sequence
  Description of Artificial Sequence: Synthetic oligonucleotide
uuucaguagugccaccagccuu

SEQ ID NO: 4419 - RNA, 22 nt, Artificial Sequence
  Description of Artificial Sequence: Synthetic oligonucleotide
uucaguagugccaccagccuuu

SEQ ID NO: 4420 - RNA, 22 nt, Artificial Sequence
  Description of Artificial Sequence: Synthetic oligonucleotide
gauucuugauggaucuggguaa

SEQ ID NO: 4421 - RNA, 22 nt, Artificial Sequence
  Description of Artificial Sequence: Synthetic oligonucleotide
auucuugauggaucuggguaag

SEQ ID NO: 4422 - RNA, 22 nt, Artificial Sequence
  Description of Artificial Sequence: Synthetic oligonucleotide
cuugauggaucuggguaaggaa

SEQ ID NO: 4423 - RNA, 22 nt, Artificial Sequence
  Description of Artificial Sequence: Synthetic oligonucleotide
uugauggaucuggguaaggaag

SEQ ID NO: 4424 - RNA, 22 nt, Artificial Sequence
  Description of Artificial Sequence: Synthetic oligonucleotide
uucuugauggaucuggguaagg

SEQ ID NO: 4425 - RNA, 22 nt, Artificial Sequence
  Description of Artificial Sequence: Synthetic oligonucleotide
ucuugauggaucuggguaagga

SEQ ID NO: 4426 - RNA, 22 nt, Artificial Sequence
  Description of Artificial Sequence: Synthetic oligonucleotide
uucucauaaacaaauccauaag

SEQ ID NO: 4427 - RNA, 22 nt, Artificial Sequence
  Description of Artificial Sequence: Synthetic oligonucleotide
uaaacaaauccauaaguucguu

SEQ ID NO: 4428 - RNA, 22 nt, Artificial Sequence
  Description of Artificial Sequence: Synthetic oligonucleotide
aaacaaauccauaaguucguuu

SEQ ID NO: 4429 - RNA, 22 nt, Artificial Sequence
  Description of Artificial Sequence: Synthetic oligonucleotide
aacaaauccauaaguucguuua

SEQ ID NO: 4430 - RNA, 22 nt, Artificial Sequence
  Description of Artificial Sequence: Synthetic oligonucleotide
acaaauccauaaguucguuuau

SEQ ID NO: 4431 - RNA, 22 nt, Artificial Sequence
  Description of Artificial Sequence: Synthetic oligonucleotide
cucauaaacaaauccauaaguu

SEQ ID NO: 4432 - RNA, 22 nt, Artificial Sequence
  Description of Artificial Sequence: Synthetic oligonucleotide
ucauaaacaaauccauaaguuc

SEQ ID NO: 4433 - RNA, 22 nt, Artificial Sequence
  Description of Artificial Sequence: Synthetic oligonucleotide
cauaaacaaauccauaaguucg

SEQ ID NO: 4434 - RNA, 22 nt, Artificial Sequence
  Description of Artificial Sequence: Synthetic oligonucleotide
auaaacaaauccauaaguucgu

SEQ ID NO: 4435 - RNA, 22 nt, Artificial Sequence
  Description of Artificial Sequence: Synthetic oligonucleotide
gcaagauuagcagaagcucuga

SEQ ID NO: 4436 - RNA, 22 nt, Artificial Sequence
  Description of Artificial Sequence: Synthetic oligonucleotide
agcaagauuagcagaagcucug

SEQ ID NO: 4437 - RNA, 22 nt, Artificial Sequence
  Description of Artificial Sequence: Synthetic oligonucleotide
cagcaagauuagcagaagcucu

SEQ ID NO: 4438 - RNA, 22 nt, Artificial Sequence
  Description of Artificial Sequence: Synthetic oligonucleotide
gcagcaagauuagcagaagcuc

SEQ ID NO: 4439 - RNA, 22 nt, Artificial Sequence
  Description of Artificial Sequence: Synthetic oligonucleotide
uugaucuaaagcauuaccauaa

SEQ ID NO: 4440 - RNA, 22 nt, Artificial Sequence
  Description of Artificial Sequence: Synthetic oligonucleotide
ugaucuaaagcauuaccauaau

SEQ ID NO: 4441 - RNA, 22 nt, Artificial Sequence
  Description of Artificial Sequence: Synthetic oligonucleotide
gaucuaaagcauuaccauaaua

SEQ ID NO: 4442 - RNA, 22 nt, Artificial Sequence
  Description of Artificial Sequence: Synthetic oligonucleotide
ggucuguguuuaauuuauaguu

SEQ ID NO: 4443 - RNA, 22 nt, Artificial Sequence
  Description of Artificial Sequence: Synthetic oligonucleotide
cuguucuaauguugaauucacu

SEQ ID NO: 4444 - RNA, 22 nt, Artificial Sequence
  Description of Artificial Sequence: Synthetic oligonucleotide
uguucuaauguugaauucacuu

SEQ ID NO: 4445 - RNA, 22 nt, Artificial Sequence
  Description of Artificial Sequence: Synthetic oligonucleotide
guucuaauguugaauucacuuu

SEQ ID NO: 4446 - RNA, 22 nt, Artificial Sequence
  Description of Artificial Sequence: Synthetic oligonucleotide
uucuaauguugaauucacuuug

SEQ ID NO: 4447 - RNA, 22 nt, Artificial Sequence
  Description of Artificial Sequence: Synthetic oligonucleotide
ucuaauguugaauucacuuuga

SEQ ID NO: 4448 - RNA, 22 nt, Artificial Sequence
  Description of Artificial Sequence: Synthetic oligonucleotide
cuaauguugaauucacuuugaa

SEQ ID NO: 4449 - RNA, 22 nt, Artificial Sequence
  Description of Artificial Sequence: Synthetic oligonucleotide
aauguugaauucacuuugaauu

SEQ ID NO: 4450 - RNA, 22 nt, Artificial Sequence
  Description of Artificial Sequence: Synthetic oligonucleotide
uacuguucuaauguugaauuca

SEQ ID NO: 4451 - RNA, 22 nt, Artificial Sequence
  Description of Artificial Sequence: Synthetic oligonucleotide
acuguucuaauguugaauucac

SEQ ID NO: 4452 - RNA, 22 nt, Artificial Sequence
  Description of Artificial Sequence: Synthetic oligonucleotide
aggcucuguuggugggaauguu

SEQ ID NO: 4453 - RNA, 22 nt, Artificial Sequence
  Description of Artificial Sequence: Synthetic oligonucleotide
ggcucuguuggugggaauguuu

SEQ ID NO: 4454 - RNA, 22 nt, Artificial Sequence
  Description of Artificial Sequence: Synthetic oligonucleotide
ucauagaagucuuuguuaaaau

SEQ ID NO: 4455 - RNA, 22 nt, Artificial Sequence
  Description of Artificial Sequence: Synthetic oligonucleotide
cauagaagucuuuguuaaaauu

SEQ ID NO: 4456 - RNA, 22 nt, Artificial Sequence
  Description of Artificial Sequence: Synthetic oligonucleotide
aagucuuuguuaaaauuaccgg

SEQ ID NO: 4457 - RNA, 22 nt, Artificial Sequence
  Description of Artificial Sequence: Synthetic oligonucleotide
agucuuuguuaaaauuaccggg

SEQ ID NO: 4458 - RNA, 22 nt, Artificial Sequence
  Description of Artificial Sequence: Synthetic oligonucleotide
gucuuuguuaaaauuaccgggu

SEQ ID NO: 4459 - RNA, 22 nt, Artificial Sequence
  Description of Artificial Sequence: Synthetic oligonucleotide
ucuuuguuaaaauuaccggguu

SEQ ID NO: 4460 - RNA, 22 nt, Artificial Sequence
  Description of Artificial Sequence: Synthetic oligonucleotide
ucugguucuagugugcccuuag

SEQ ID NO: 4461 - RNA, 22 nt, Artificial Sequence
  Description of Artificial Sequence: Synthetic oligonucleotide
aauaauagcucauaccuccuaa

SEQ ID NO: 4462 - RNA, 22 nt, Artificial Sequence
  Description of Artificial Sequence: Synthetic oligonucleotide
caauaauagcucauaccuccua

SEQ ID NO: 4463 - RNA, 22 nt, Artificial Sequence
  Description of Artificial Sequence: Synthetic oligonucleotide
acaauaauagcucauaccuccu

SEQ ID NO: 4464 - RNA, 22 nt, Artificial Sequence
  Description of Artificial Sequence: Synthetic oligonucleotide
uacaauaauagcucauaccucc

SEQ ID NO: 4465 - RNA, 22 nt, Artificial Sequence
  Description of Artificial Sequence: Synthetic oligonucleotide
uuacaauaauagcucauaccuc

SEQ ID NO: 4466 - RNA, 22 nt, Artificial Sequence
  Description of Artificial Sequence: Synthetic oligonucleotide
ucagugccaagcucgucgccua

SEQ ID NO: 4467 - RNA, 22 nt, Artificial Sequence
  Description of Artificial Sequence: Synthetic oligonucleotide
cagugccaagcucgucgccuaa

SEQ ID NO: 4468 - RNA, 22 nt, Artificial Sequence
  Description of Artificial Sequence: Synthetic oligonucleotide
gaucagugccaagcucgucgcc

SEQ ID NO: 4469 - RNA, 22 nt, Artificial Sequence
  Description of Artificial Sequence: Synthetic oligonucleotide
aucagugccaagcucgucgccu

SEQ ID NO: 4470 - RNA, 22 nt, Artificial Sequence
  Description of Artificial Sequence: Synthetic oligonucleotide
ggaucagugccaagcucgucgc

SEQ ID NO: 4471 - RNA, 22 nt, Artificial Sequence
  Description of Artificial Sequence: Synthetic oligonucleotide
cacccugcauggaaagcaaaac

SEQ ID NO: 4472 - RNA, 22 nt, Artificial Sequence
  Description of Artificial Sequence: Synthetic oligonucleotide
gcacccugcauggaaagcaaaa

SEQ ID NO: 4473 - RNA, 22 nt, Artificial Sequence
  Description of Artificial Sequence: Synthetic oligonucleotide
cccugcauggaaagcaaaacag

SEQ ID NO: 4474 - RNA, 22 nt, Artificial Sequence
  Description of Artificial Sequence: Synthetic oligonucleotide
acccugcauggaaagcaaaaca

SEQ ID NO: 4475 - RNA, 22 nt, Artificial Sequence
  Description of Artificial Sequence: Synthetic oligonucleotide
ccugcauggaaagcaaaacaga

SEQ ID NO: 4476 - RNA, 22 nt, Artificial Sequence
  Description of Artificial Sequence: Synthetic oligonucleotide
accgcaaacccguuuaaaaacg

SEQ ID NO: 4477 - RNA, 22 nt, Artificial Sequence
  Description of Artificial Sequence: Synthetic oligonucleotide
ccgcaaacccguuuaaaaacga

SEQ ID NO: 4478 - RNA, 22 nt, Artificial Sequence
  Description of Artificial Sequence: Synthetic oligonucleotide
acaccgcaaacccguuuaaaaa

SEQ ID NO: 4479 - RNA, 22 nt, Artificial Sequence
  Description of Artificial Sequence: Synthetic oligonucleotide
caccgcaaacccguuuaaaaac

SEQ ID NO: 4480 - RNA, 22 nt, Artificial Sequence
  Description of Artificial Sequence: Synthetic oligonucleotide
uuacaccgcaaacccguuuaaa

SEQ ID NO: 4481 - RNA, 22 nt, Artificial Sequence
  Description of Artificial Sequence: Synthetic oligonucleotide
uacaccgcaaacccguuuaaaa

SEQ ID NO: 4482 - RNA, 22 nt, Artificial Sequence
  Description of Artificial Sequence: Synthetic oligonucleotide
acuuacaccgcaaacccguuua

SEQ ID NO: 4483 - RNA, 22 nt, Artificial Sequence
  Description of Artificial Sequence: Synthetic oligonucleotide
cuuacaccgcaaacccguuuaa

SEQ ID NO: 4484 - RNA, 22 nt, Artificial Sequence
  Description of Artificial Sequence: Synthetic oligonucleotide
gcacuuacaccgcaaacccguu

SEQ ID NO: 4485 - RNA, 22 nt, Artificial Sequence
  Description of Artificial Sequence: Synthetic oligonucleotide
cacuuacaccgcaaacccguuu

SEQ ID NO: 4486 - RNA, 22 nt, Artificial Sequence
  Description of Artificial Sequence: Synthetic oligonucleotide
ccgccacacaugaccauuucac

SEQ ID NO: 4487 - RNA, 22 nt, Artificial Sequence
  Description of Artificial Sequence: Synthetic oligonucleotide
gugaaccgccacacaugaccau

SEQ ID NO: 4488 - RNA, 22 nt, Artificial Sequence
  Description of Artificial Sequence: Synthetic oligonucleotide
uagugaaccgccacacaugacc

SEQ ID NO: 4489 - RNA, 22 nt, Artificial Sequence
  Description of Artificial Sequence: Synthetic oligonucleotide
agugaaccgccacacaugacca

SEQ ID NO: 4490 - RNA, 22 nt, Artificial Sequence
  Description of Artificial Sequence: Synthetic oligonucleotide
uauagugaaccgccacacauga

SEQ ID NO: 4491 - RNA, 22 nt, Artificial Sequence
  Description of Artificial Sequence: Synthetic oligonucleotide
auagugaaccgccacacaugac

SEQ ID NO: 4492 - RNA, 22 nt, Artificial Sequence
  Description of Artificial Sequence: Synthetic oligonucleotide
guccaccaaacguaaugcgggg

SEQ ID NO: 4493 - RNA, 22 nt, Artificial Sequence
  Description of Artificial Sequence: Synthetic oligonucleotide
gguccaccaaacguaaugcggg

SEQ ID NO: 4494 - RNA, 22 nt, Artificial Sequence
  Description of Artificial Sequence: Synthetic oligonucleotide
ggguccaccaaacguaaugcgg

SEQ ID NO: 4495 - RNA, 22 nt, Artificial Sequence
  Description of Artificial Sequence: Synthetic oligonucleotide
uacgaagaagaaccuugcggua

SEQ ID NO: 4496 - RNA, 22 nt, Artificial Sequence
  Description of Artificial Sequence: Synthetic oligonucleotide
auucaugagguccuuuaguaag

SEQ ID NO: 4497 - RNA, 22 nt, Artificial Sequence
  Description of Artificial Sequence: Synthetic oligonucleotide
aauucaugagguccuuuaguaa

SEQ ID NO: 4498 - RNA, 22 nt, Artificial Sequence
  Description of Artificial Sequence: Synthetic oligonucleotide
accacgaaagcaagaaaaagaa

SEQ ID NO: 4499 - RNA, 22 nt, Artificial Sequence
  Description of Artificial Sequence: Synthetic oligonucleotide
uaccacgaaagcaagaaaaaga

SEQ ID NO: 4500 - RNA, 22 nt, Artificial Sequence
  Description of Artificial Sequence: Synthetic oligonucleotide
auaccacgaaagcaagaaaaag

SEQ ID NO: 4501 - RNA, 22 nt, Artificial Sequence
  Description of Artificial Sequence: Synthetic oligonucleotide
aauaccacgaaagcaagaaaaa

SEQ ID NO: 4502 - RNA, 22 nt, Artificial Sequence
  Description of Artificial Sequence: Synthetic oligonucleotide
cgaaagcaagaaaaagaaguac

SEQ ID NO: 4503 - RNA, 22 nt, Artificial Sequence
  Description of Artificial Sequence: Synthetic oligonucleotide
acgaaagcaagaaaaagaagua

SEQ ID NO: 4504 - RNA, 22 nt, Artificial Sequence
  Description of Artificial Sequence: Synthetic oligonucleotide
cacgaaagcaagaaaaagaagu

SEQ ID NO: 4505 - RNA, 22 nt, Artificial Sequence
  Description of Artificial Sequence: Synthetic oligonucleotide
ccacgaaagcaagaaaaagaag

SEQ ID NO: 4506 - RNA, 22 nt, Artificial Sequence
  Description of Artificial Sequence: Synthetic oligonucleotide
gaauaccacgaaagcaagaaaa

SEQ ID NO: 4507 - RNA, 22 nt, Artificial Sequence
  Description of Artificial Sequence: Synthetic oligonucleotide
agaauaccacgaaagcaagaaa

SEQ ID NO: 4508 - RNA, 22 nt, Artificial Sequence
  Description of Artificial Sequence: Synthetic oligonucleotide
uuuggcaauguuguuccuugag

SEQ ID NO: 4509 - RNA, 22 nt, Artificial Sequence
  Description of Artificial Sequence: Synthetic oligonucleotide
auguuguuccuugaggaaguug

SEQ ID NO: 4510 - RNA, 22 nt, Artificial Sequence
  Description of Artificial Sequence: Synthetic oligonucleotide
uguuguuccuugaggaaguugu

SEQ ID NO: 4511 - RNA, 22 nt, Artificial Sequence
  Description of Artificial Sequence: Synthetic oligonucleotide
caauguuguuccuugaggaagu

SEQ ID NO: 4512 - RNA, 22 nt, Artificial Sequence
  Description of Artificial Sequence: Synthetic oligonucleotide
aauguuguuccuugaggaaguu

SEQ ID NO: 4513 - RNA, 22 nt, Artificial Sequence
  Description of Artificial Sequence: Synthetic oligonucleotide
ggcaauguuguuccuugaggaa

SEQ ID NO: 4514 - RNA, 22 nt, Artificial Sequence
  Description of Artificial Sequence: Synthetic oligonucleotide
gcaauguuguuccuugaggaag

SEQ ID NO: 4515 - RNA, 22 nt, Artificial Sequence
  Description of Artificial Sequence: Synthetic oligonucleotide
uuggcaauguuguuccuugagg

SEQ ID NO: 4516 - RNA, 22 nt, Artificial Sequence
  Description of Artificial Sequence: Synthetic oligonucleotide
uggcaauguuguuccuugagga

SEQ ID NO: 4517 - RNA, 22 nt, Artificial Sequence
  Description of Artificial Sequence: Synthetic oligonucleotide
ugguccccaaaauuuccuuggg

SEQ ID NO: 4518 - RNA, 22 nt, Artificial Sequence
  Description of Artificial Sequence: Synthetic oligonucleotide
gguccccaaaauuuccuugggu

SEQ ID NO: 4519 - RNA, 22 nt, Artificial Sequence
  Description of Artificial Sequence: Synthetic oligonucleotide
cuaauuucacuaaguugaacaa

SEQ ID NO: 4520 - RNA, 22 nt, Artificial Sequence
  Description of Artificial Sequence: Synthetic oligonucleotide
uaauuucacuaaguugaacaau

SEQ ID NO: 4521 - RNA, 22 nt, Artificial Sequence
  Description of Artificial Sequence: Synthetic oligonucleotide
aauuucacuaaguugaacaauu

SEQ ID NO: 4522 - RNA, 22 nt, Artificial Sequence
  Description of Artificial Sequence: Synthetic oligonucleotide
auuucacuaaguugaacaauuu

SEQ ID NO: 4523 - RNA, 22 nt, Artificial Sequence
  Description of Artificial Sequence: Synthetic oligonucleotide
uugguucucauagagaacauuc

SEQ ID NO: 4524 - RNA, 22 nt, Artificial Sequence
  Description of Artificial Sequence: Synthetic oligonucleotide
uuugguucucauagagaacauu

SEQ ID NO: 4525 - RNA, 22 nt, Artificial Sequence
  Description of Artificial Sequence: Synthetic oligonucleotide
guccaucaaagugucccuuauu

SEQ ID NO: 4526 - RNA, 22 nt, Artificial Sequence
  Description of Artificial Sequence: Synthetic oligonucleotide
gucacaaaauccuuuaggauuu

SEQ ID NO: 4527 - RNA, 22 nt, Artificial Sequence
  Description of Artificial Sequence: Synthetic oligonucleotide
agucacaaaauccuuuaggauu

SEQ ID NO: 4528 - RNA, 22 nt, Artificial Sequence
  Description of Artificial Sequence: Synthetic oligonucleotide
auccuuuaggauuuggaugauc

SEQ ID NO: 4529 - RNA, 22 nt, Artificial Sequence
  Description of Artificial Sequence: Synthetic oligonucleotide
aauccuuuaggauuuggaugau

SEQ ID NO: 4530 - RNA, 22 nt, Artificial Sequence
  Description of Artificial Sequence: Synthetic oligonucleotide
aaaauccuuuaggauuuggaug

SEQ ID NO: 4531 - RNA, 22 nt, Artificial Sequence
  Description of Artificial Sequence: Synthetic oligonucleotide
caaaauccuuuaggauuuggau

SEQ ID NO: 4532 - RNA, 22 nt, Artificial Sequence
  Description of Artificial Sequence: Synthetic oligonucleotide
acaaaauccuuuaggauuugga

SEQ ID NO: 4533 - RNA, 22 nt, Artificial Sequence
  Description of Artificial Sequence: Synthetic oligonucleotide
cacaaaauccuuuaggauuugg

SEQ ID NO: 4534 - RNA, 22 nt, Artificial Sequence
  Description of Artificial Sequence: Synthetic oligonucleotide
ucacaaaauccuuuaggauuug

SEQ ID NO: 4535 - RNA, 22 nt, Artificial Sequence
  Description of Artificial Sequence: Synthetic oligonucleotide
aaggaauaggaaaccuauuacu

SEQ ID NO: 4536 - RNA, 22 nt, Artificial Sequence
  Description of Artificial Sequence: Synthetic oligonucleotide
gaauaggaaaccuauuacuagg

SEQ ID NO: 4537 - RNA, 22 nt, Artificial Sequence
  Description of Artificial Sequence: Synthetic oligonucleotide
aauaggaaaccuauuacuaggu

SEQ ID NO: 4538 - RNA, 22 nt, Artificial Sequence
  Description of Artificial Sequence: Synthetic oligonucleotide
aggaauaggaaaccuauuacua

SEQ ID NO: 4539 - RNA, 22 nt, Artificial Sequence
  Description of Artificial Sequence: Synthetic oligonucleotide
ggaauaggaaaccuauuacuag

SEQ ID NO: 4540 - RNA, 22 nt, Artificial Sequence
  Description of Artificial Sequence: Synthetic oligonucleotide
aucaguuccuugucugauuagu

SEQ ID NO: 4541 - RNA, 22 nt, Artificial Sequence
  Description of Artificial Sequence: Synthetic oligonucleotide
caguuccuugucugauuaguuc

SEQ ID NO: 4542 - RNA, 22 nt, Artificial Sequence
  Description of Artificial Sequence: Synthetic oligonucleotide
ucaguuccuugucugauuaguu

SEQ ID NO: 4543 - RNA, 22 nt, Artificial Sequence
  Description of Artificial Sequence: Synthetic oligonucleotide
uaaucaguuccuugucugauua

SEQ ID NO: 4544 - RNA, 22 nt, Artificial Sequence
  Description of Artificial Sequence: Synthetic oligonucleotide
guaaucaguuccuugucugauu

SEQ ID NO: 4545 - RNA, 22 nt, Artificial Sequence
  Description of Artificial Sequence: Synthetic oligonucleotide
caaagaagauguacauucuaac

SEQ ID NO: 4546 - RNA, 22 nt, Artificial Sequence
  Description of Artificial Sequence: Synthetic oligonucleotide
gcaaagaagauguacauucuaa

SEQ ID NO: 4547 - RNA, 22 nt, Artificial Sequence
  Description of Artificial Sequence: Synthetic oligonucleotide
gcauugucuaacaacaucaaaa

SEQ ID NO: 4548 - RNA, 22 nt, Artificial Sequence
  Description of Artificial Sequence: Synthetic oligonucleotide
aaagaagauguacauucuaacc

SEQ ID NO: 4549 - RNA, 22 nt, Artificial Sequence
  Description of Artificial Sequence: Synthetic oligonucleotide
agaagauguacauucuaaccau

SEQ ID NO: 4550 - RNA, 22 nt, Artificial Sequence
  Description of Artificial Sequence: Synthetic oligonucleotide
uaaucuauguuaaaaccaacac

SEQ ID NO: 4551 - RNA, 22 nt, Artificial Sequence
  Description of Artificial Sequence: Synthetic oligonucleotide
auaaucuauguuaaaaccaaca

SEQ ID NO: 4552 - RNA, 22 nt, Artificial Sequence
  Description of Artificial Sequence: Synthetic oligonucleotide
cauaaucuauguuaaaaccaac

SEQ ID NO: 4553 - RNA, 22 nt, Artificial Sequence
  Description of Artificial Sequence: Synthetic oligonucleotide
ucauaaucuauguuaaaaccaa

SEQ ID NO: 4554 - RNA, 22 nt, Artificial Sequence
  Description of Artificial Sequence: Synthetic oligonucleotide
ucacacccggacgaaaccuaga

SEQ ID NO: 4555 - RNA, 22 nt, Artificial Sequence
  Description of Artificial Sequence: Synthetic oligonucleotide
cacacccggacgaaaccuagau

SEQ ID NO: 4556 - RNA, 22 nt, Artificial Sequence
  Description of Artificial Sequence: Synthetic oligonucleotide
augaaagauguaauucucuguc

SEQ ID NO: 4557 - RNA, 22 nt, Artificial Sequence
  Description of Artificial Sequence: Synthetic oligonucleotide
ugaaagauguaauucucuguca

SEQ ID NO: 4558 - RNA, 22 nt, Artificial Sequence
  Description of Artificial Sequence: Synthetic oligonucleotide
gaaagauguaauucucugucag

SEQ ID NO: 4559 - RNA, 22 nt, Artificial Sequence
  Description of Artificial Sequence: Synthetic oligonucleotide
aaagauguaauucucugucaga

SEQ ID NO: 4560 - RNA, 22 nt, Artificial Sequence
  Description of Artificial Sequence: Synthetic oligonucleotide
ucacaauuaccuucaucaaaau

SEQ ID NO: 4561 - RNA, 22 nt, Artificial Sequence
  Description of Artificial Sequence: Synthetic oligonucleotide
cacaauuaccuucaucaaaaug

SEQ ID NO: 4562 - RNA, 22 nt, Artificial Sequence
  Description of Artificial Sequence: Synthetic oligonucleotide
caacaacuucaacuacaaauag

SEQ ID NO: 4563 - RNA, 22 nt, Artificial Sequence
  Description of Artificial Sequence: Synthetic oligonucleotide
aucaacaacuucaacuacaaau

SEQ ID NO: 4564 - RNA, 22 nt, Artificial Sequence
  Description of Artificial Sequence: Synthetic oligonucleotide
ucaacaacuucaacuacaaaua

SEQ ID NO: 4565 - RNA, 22 nt, Artificial Sequence
  Description of Artificial Sequence: Synthetic oligonucleotide
guaugcagcaaaaccugaguca

SEQ ID NO: 4566 - RNA, 22 nt, Artificial Sequence
  Description of Artificial Sequence: Synthetic oligonucleotide
uguaugcagcaaaaccugaguc

SEQ ID NO: 4567 - RNA, 22 nt, Artificial Sequence
  Description of Artificial Sequence: Synthetic oligonucleotide
uguggcacuaguguaggugcac

SEQ ID NO: 4568 - RNA, 22 nt, Artificial Sequence
  Description of Artificial Sequence: Synthetic oligonucleotide
uuguggcacuaguguaggugca

SEQ ID NO: 4569 - RNA, 22 nt, Artificial Sequence
  Description of Artificial Sequence: Synthetic oligonucleotide
guggcacuaguguaggugcacu

SEQ ID NO: 4570 - RNA, 22 nt, Artificial Sequence
  Description of Artificial Sequence: Synthetic oligonucleotide
gccauuugcauagcaaauggua

SEQ ID NO: 4571 - RNA, 22 nt, Artificial Sequence
  Description of Artificial Sequence: Synthetic oligonucleotide
auuugcauagcaaaugguauuu

SEQ ID NO: 4572 - RNA, 22 nt, Artificial Sequence
  Description of Artificial Sequence: Synthetic oligonucleotide
uuugcauagcaaaugguauuug

SEQ ID NO: 4573 - RNA, 22 nt, Artificial Sequence
  Description of Artificial Sequence: Synthetic oligonucleotide
ccauuugcauagcaaaugguau

SEQ ID NO: 4574 - RNA, 22 nt, Artificial Sequence
  Description of Artificial Sequence: Synthetic oligonucleotide
cauuugcauagcaaaugguauu

SEQ ID NO: 4575 - RNA, 22 nt, Artificial Sequence
  Description of Artificial Sequence: Synthetic oligonucleotide
auauuuaguucguuuagaccag

SEQ ID NO: 4576 - RNA, 22 nt, Artificial Sequence
  Description of Artificial Sequence: Synthetic oligonucleotide
aauauuuaguucguuuagacca

SEQ ID NO: 4577 - RNA, 22 nt, Artificial Sequence
  Description of Artificial Sequence: Synthetic oligonucleotide
uagucccagaucacaguauuag

SEQ ID NO: 4578 - RNA, 22 nt, Artificial Sequence
  Description of Artificial Sequence: Synthetic oligonucleotide
guagucccagaucacaguauua

SEQ ID NO: 4579 - RNA, 22 nt, Artificial Sequence
  Description of Artificial Sequence: Synthetic oligonucleotide
gucccagaucacaguauuagca

SEQ ID NO: 4580 - RNA, 22 nt, Artificial Sequence
  Description of Artificial Sequence: Synthetic oligonucleotide
agucccagaucacaguauuagc

SEQ ID NO: 4581 - RNA, 22 nt, Artificial Sequence
  Description of Artificial Sequence: Synthetic oligonucleotide
cccagaucacaguauuagcagc

SEQ ID NO: 4582 - RNA, 22 nt, Artificial Sequence
  Description of Artificial Sequence: Synthetic oligonucleotide
ucccagaucacaguauuagcag

SEQ ID NO: 4583 - RNA, 22 nt, Artificial Sequence
  Description of Artificial Sequence: Synthetic oligonucleotide
gugguccaaaacuuguaggugg

SEQ ID NO: 4584 - RNA, 22 nt, Artificial Sequence
  Description of Artificial Sequence: Synthetic oligonucleotide
cgggugauaaacauguuagggu

SEQ ID NO: 4585 - RNA, 22 nt, Artificial Sequence
  Description of Artificial Sequence: Synthetic oligonucleotide
gggugauaaacauguuagggua

SEQ ID NO: 4586 - RNA, 22 nt, Artificial Sequence
  Description of Artificial Sequence: Synthetic oligonucleotide
auaaacauguuaggguaaccau

SEQ ID NO: 4587 - RNA, 22 nt, Artificial Sequence
  Description of Artificial Sequence: Synthetic oligonucleotide
uaaacauguuaggguaaccauu

SEQ ID NO: 4588 - RNA, 22 nt, Artificial Sequence
  Description of Artificial Sequence: Synthetic oligonucleotide
ggugauaaacauguuaggguaa

SEQ ID NO: 4589 - RNA, 22 nt, Artificial Sequence
  Description of Artificial Sequence: Synthetic oligonucleotide
gugauaaacauguuaggguaac

SEQ ID NO: 4590 - RNA, 22 nt, Artificial Sequence
  Description of Artificial Sequence: Synthetic oligonucleotide
ugauaaacauguuaggguaacc

SEQ ID NO: 4591 - RNA, 22 nt, Artificial Sequence
  Description of Artificial Sequence: Synthetic oligonucleotide
gauaaacauguuaggguaacca

SEQ ID NO: 4592 - RNA, 22 nt, Artificial Sequence
  Description of Artificial Sequence: Synthetic oligonucleotide
uacaagagugagcuguuucagu

SEQ ID NO: 4593 - RNA, 22 nt, Artificial Sequence
  Description of Artificial Sequence: Synthetic oligonucleotide
cauuacaagagugagcuguuuc

SEQ ID NO: 4594 - RNA, 22 nt, Artificial Sequence
  Description of Artificial Sequence: Synthetic oligonucleotide
aaccuauuacuagguuccauug

SEQ ID NO: 4595 - RNA, 22 nt, Artificial Sequence
  Description of Artificial Sequence: Synthetic oligonucleotide
augugguaccaugucaccgucu

SEQ ID NO: 4596 - RNA, 22 nt, Artificial Sequence
  Description of Artificial Sequence: Synthetic oligonucleotide
uaugugguaccaugucaccguc

SEQ ID NO: 4597 - RNA, 22 nt, Artificial Sequence
  Description of Artificial Sequence: Synthetic oligonucleotide
ugugguaccaugucaccgucua

SEQ ID NO: 4598 - RNA, 22 nt, Artificial Sequence
  Description of Artificial Sequence: Synthetic oligonucleotide
auauaugugguaccaugucacc

SEQ ID NO: 4599 - RNA, 22 nt, Artificial Sequence
  Description of Artificial Sequence: Synthetic oligonucleotide
gauauaugugguaccaugucac

SEQ ID NO: 4600 - RNA, 22 nt, Artificial Sequence
  Description of Artificial Sequence: Synthetic oligonucleotide
auaugugguaccaugucaccgu

SEQ ID NO: 4601 - RNA, 22 nt, Artificial Sequence
  Description of Artificial Sequence: Synthetic oligonucleotide
uauaugugguaccaugucaccg

SEQ ID NO: 4602 - RNA, 22 nt, Artificial Sequence
  Description of Artificial Sequence: Synthetic oligonucleotide
ugauauaugugguaccauguca

SEQ ID NO: 4603 - RNA, 22 nt, Artificial Sequence
  Description of Artificial Sequence: Synthetic oligonucleotide
gugauauaugugguaccauguc

SEQ ID NO: 4604 - RNA, 22 nt, Artificial Sequence
  Description of Artificial Sequence: Synthetic oligonucleotide
uucguuuagagaacagaucuac

SEQ ID NO: 4605 - RNA, 22 nt, Artificial Sequence
  Description of Artificial Sequence: Synthetic oligonucleotide
acagcauucugugaauuauaag

SEQ ID NO: 4606 - RNA, 22 nt, Artificial Sequence
  Description of Artificial Sequence: Synthetic oligonucleotide
cagcauucugugaauuauaagg

SEQ ID NO: 4607 - RNA, 22 nt, Artificial Sequence
  Description of Artificial Sequence: Synthetic oligonucleotide
agcauucugugaauuauaaggu

SEQ ID NO: 4608 - RNA, 22 nt, Artificial Sequence
  Description of Artificial Sequence: Synthetic oligonucleotide
gcauucugugaauuauaaggug

SEQ ID NO: 4609 - RNA, 22 nt, Artificial Sequence
  Description of Artificial Sequence: Synthetic oligonucleotide
gcuacagcauucugugaauuau

SEQ ID NO: 4610 - RNA, 22 nt, Artificial Sequence
  Description of Artificial Sequence: Synthetic oligonucleotide
cuacagcauucugugaauuaua

SEQ ID NO: 4611 - RNA, 22 nt, Artificial Sequence
  Description of Artificial Sequence: Synthetic oligonucleotide
uacagcauucugugaauuauaa

SEQ ID NO: 4612 - RNA, 22 nt, Artificial Sequence
  Description of Artificial Sequence: Synthetic oligonucleotide
uaauauuuaguucguuuagacc

SEQ ID NO: 4613 - RNA, 22 nt, Artificial Sequence
  Description of Artificial Sequence: Synthetic oligonucleotide
aaaucaacaucuggugauguau

SEQ ID NO: 4614 - RNA, 22 nt, Artificial Sequence
  Description of Artificial Sequence: Synthetic oligonucleotide
aucaacaucuggugauguauga

SEQ ID NO: 4615 - RNA, 22 nt, Artificial Sequence
  Description of Artificial Sequence: Synthetic oligonucleotide
aaucaacaucuggugauguaug

SEQ ID NO: 4616 - RNA, 22 nt, Artificial Sequence
  Description of Artificial Sequence: Synthetic oligonucleotide
caacaucuggugauguaugauu

SEQ ID NO: 4617 - RNA, 22 nt, Artificial Sequence
  Description of Artificial Sequence: Synthetic oligonucleotide
ucaacaucuggugauguaugau

SEQ ID NO: 4618 - RNA, 22 nt, Artificial Sequence
  Description of Artificial Sequence: Synthetic oligonucleotide
acaucuggugauguaugauucu

SEQ ID NO: 4619 - RNA, 22 nt, Artificial Sequence
  Description of Artificial Sequence: Synthetic oligonucleotide
aacaucuggugauguaugauuc

SEQ ID NO: 4620 - RNA, 22 nt, Artificial Sequence
  Description of Artificial Sequence: Synthetic oligonucleotide
agcccuguauacgacaucagua

SEQ ID NO: 4621 - RNA, 22 nt, Artificial Sequence
  Description of Artificial Sequence: Synthetic oligonucleotide
aagcccuguauacgacaucagu

SEQ ID NO: 4622 - RNA, 22 nt, Artificial Sequence
  Description of Artificial Sequence: Synthetic oligonucleotide
aaagcccuguauacgacaucag

SEQ ID NO: 4623 - RNA, 22 nt, Artificial Sequence
  Description of Artificial Sequence: Synthetic oligonucleotide
aaaagcccuguauacgacauca

SEQ ID NO: 4624 - RNA, 22 nt, Artificial Sequence
  Description of Artificial Sequence: Synthetic oligonucleotide
cuguauacgacaucaguacuag

SEQ ID NO: 4625 - RNA, 22 nt, Artificial Sequence
  Description of Artificial Sequence: Synthetic oligonucleotide
ccuguauacgacaucaguacua

SEQ ID NO: 4626 - RNA, 22 nt, Artificial Sequence
  Description of Artificial Sequence: Synthetic oligonucleotide
cccuguauacgacaucaguacu

SEQ ID NO: 4627 - RNA, 22 nt, Artificial Sequence
  Description of Artificial Sequence: Synthetic oligonucleotide
gcccuguauacgacaucaguac

SEQ ID NO: 4628 - RNA, 22 nt, Artificial Sequence
  Description of Artificial Sequence: Synthetic oligonucleotide
caaaagcccuguauacgacauc

SEQ ID NO: 4629 - RNA, 22 nt, Artificial Sequence
  Description of Artificial Sequence: Synthetic oligonucleotide
ucaaaagcccuguauacgacau

SEQ ID NO: 4630 - RNA, 22 nt, Artificial Sequence
  Description of Artificial Sequence: Synthetic oligonucleotide
acugguuuaauguugcgcuuag

SEQ ID NO: 4631 - RNA, 22 nt, Artificial Sequence
  Description of Artificial Sequence: Synthetic oligonucleotide
cugguuuaauguugcgcuuagc

SEQ ID NO: 4632 - RNA, 22 nt, Artificial Sequence
  Description of Artificial Sequence: Synthetic oligonucleotide
gcuucuggcccaguuccuaggu

SEQ ID NO: 4633 - RNA, 22 nt, Artificial Sequence
  Description of Artificial Sequence: Synthetic oligonucleotide
cuucuggcccaguuccuaggua

SEQ ID NO: 4634 - RNA, 22 nt, Artificial Sequence
  Description of Artificial Sequence: Synthetic oligonucleotide
agcuucuggcccaguuccuagg

SEQ ID NO: 4635 - RNA, 22 nt, Artificial Sequence
  Description of Artificial Sequence: Synthetic oligonucleotide
ccaauuacuacaguagcuccuc

SEQ ID NO: 4636 - RNA, 22 nt, Artificial Sequence
  Description of Artificial Sequence: Synthetic oligonucleotide
uccaauuacuacaguagcuccu

SEQ ID NO: 4637 - RNA, 22 nt, Artificial Sequence
  Description of Artificial Sequence: Synthetic oligonucleotide
acuacaguagcuccucuagugg

SEQ ID NO: 4638 - RNA, 22 nt, Artificial Sequence
  Description of Artificial Sequence: Synthetic oligonucleotide
uacuacaguagcuccucuagug

SEQ ID NO: 4639 - RNA, 22 nt, Artificial Sequence
  Description of Artificial Sequence: Synthetic oligonucleotide
uacaguagcuccucuaguggcg

SEQ ID NO: 4640 - RNA, 22 nt, Artificial Sequence
  Description of Artificial Sequence: Synthetic oligonucleotide
cuacaguagcuccucuaguggc

SEQ ID NO: 4641 - RNA, 22 nt, Artificial Sequence
  Description of Artificial Sequence: Synthetic oligonucleotide
aauuacuacaguagcuccucua

SEQ ID NO: 4642 - RNA, 22 nt, Artificial Sequence
  Description of Artificial Sequence: Synthetic oligonucleotide
caauuacuacaguagcuccucu

SEQ ID NO: 4643 - RNA, 22 nt, Artificial Sequence
  Description of Artificial Sequence: Synthetic oligonucleotide
uuacuacaguagcuccucuagu

SEQ ID NO: 4644 - RNA, 22 nt, Artificial Sequence
  Description of Artificial Sequence: Synthetic oligonucleotide
auuacuacaguagcuccucuag

SEQ ID NO: 4645 - RNA, 22 nt, Artificial Sequence
  Description of Artificial Sequence: Synthetic oligonucleotide
uagcaaaaugacucuuaccagu

SEQ ID NO: 4646 - RNA, 22 nt, Artificial Sequence
  Description of Artificial Sequence: Synthetic oligonucleotide
agcaaaaugacucuuaccagua

SEQ ID NO: 4647 - RNA, 22 nt, Artificial Sequence
  Description of Artificial Sequence: Synthetic oligonucleotide
auagcaaaaugacucuuaccag

SEQ ID NO: 4648 - RNA, 22 nt, Artificial Sequence
  Description of Artificial Sequence: Synthetic oligonucleotide
acgaaccguucaaucauaagug

SEQ ID NO: 4649 - RNA, 22 nt, Artificial Sequence
  Description of Artificial Sequence: Synthetic oligonucleotide
cgaaccguucaaucauaagugu

SEQ ID NO: 4650 - RNA, 22 nt, Artificial Sequence
  Description of Artificial Sequence: Synthetic oligonucleotide
gaaccguucaaucauaagugua

SEQ ID NO: 4651 - RNA, 22 nt, Artificial Sequence
  Description of Artificial Sequence: Synthetic oligonucleotide
aaccguucaaucauaaguguac

SEQ ID NO: 4652 - RNA, 22 nt, Artificial Sequence
  Description of Artificial Sequence: Synthetic oligonucleotide
gacacgaaccguucaaucauaa

SEQ ID NO: 4653 - RNA, 22 nt, Artificial Sequence
  Description of Artificial Sequence: Synthetic oligonucleotide
acacgaaccguucaaucauaag

SEQ ID NO: 4654 - RNA, 22 nt, Artificial Sequence
  Description of Artificial Sequence: Synthetic oligonucleotide
cacgaaccguucaaucauaagu

SEQ ID NO: 4655 - RNA, 22 nt, Artificial Sequence
  Description of Artificial Sequence: Synthetic oligonucleotide
uccuuuaguaaggucagucuca

SEQ ID NO: 4656 - RNA, 22 nt, Artificial Sequence
  Description of Artificial Sequence: Synthetic oligonucleotide
uuaguaaggucagucucagucc

SEQ ID NO: 4657 - RNA, 22 nt, Artificial Sequence
  Description of Artificial Sequence: Synthetic oligonucleotide
auagcccaucugccuugugugg

SEQ ID NO: 4658 - RNA, 22 nt, Artificial Sequence
  Description of Artificial Sequence: Synthetic oligonucleotide
uauagcccaucugccuugugug

SEQ ID NO: 4659 - RNA, 22 nt, Artificial Sequence
  Description of Artificial Sequence: Synthetic oligonucleotide
gcccaucugccuuguguggucu

SEQ ID NO: 4660 - RNA, 22 nt, Artificial Sequence
  Description of Artificial Sequence: Synthetic oligonucleotide
agcccaucugccuugugugguc

SEQ ID NO: 4661 - RNA, 22 nt, Artificial Sequence
  Description of Artificial Sequence: Synthetic oligonucleotide
uagcccaucugccuuguguggu

SEQ ID NO: 4662 - RNA, 22 nt, Artificial Sequence
  Description of Artificial Sequence: Synthetic oligonucleotide
ugacuuccaugccaaugcgcga

SEQ ID NO: 4663 - RNA, 22 nt, Artificial Sequence
  Description of Artificial Sequence: Synthetic oligonucleotide
gugacuuccaugccaaugcgcg

SEQ ID NO: 4664 - RNA, 22 nt, Artificial Sequence
  Description of Artificial Sequence: Synthetic oligonucleotide
acuuccaugccaaugcgcgaca

SEQ ID NO: 4665 - RNA, 22 nt, Artificial Sequence
  Description of Artificial Sequence: Synthetic oligonucleotide
gacuuccaugccaaugcgcgac

SEQ ID NO: 4666 - RNA, 22 nt, Artificial Sequence
  Description of Artificial Sequence: Synthetic oligonucleotide
uuccaugccaaugcgcgacauu

SEQ ID NO: 4667 - RNA, 22 nt, Artificial Sequence
  Description of Artificial Sequence: Synthetic oligonucleotide
cuuccaugccaaugcgcgacau

SEQ ID NO: 4668 - RNA, 22 nt, Artificial Sequence
  Description of Artificial Sequence: Synthetic oligonucleotide
ccaugccaaugcgcgacauucc

SEQ ID NO: 4669 - RNA, 22 nt, Artificial Sequence
  Description of Artificial Sequence: Synthetic oligonucleotide
uccaugccaaugcgcgacauuc

SEQ ID NO: 4670 - RNA, 22 nt, Artificial Sequence
  Description of Artificial Sequence: Synthetic oligonucleotide
uucuacaucacuauaaacaguu

SEQ ID NO: 4671 - RNA, 22 nt, Artificial Sequence
  Description of Artificial Sequence: Synthetic oligonucleotide
ucuacaucacuauaaacaguuu

SEQ ID NO: 4672 - RNA, 22 nt, Artificial Sequence
  Description of Artificial Sequence: Synthetic oligonucleotide
uaauuuauaauuauaaucagca

SEQ ID NO: 4673 - RNA, 22 nt, Artificial Sequence
  Description of Artificial Sequence: Synthetic oligonucleotide
gcgacuacgugaugaggaacga

SEQ ID NO: 4674 - RNA, 22 nt, Artificial Sequence
  Description of Artificial Sequence: Synthetic oligonucleotide
cgacuacgugaugaggaacgag

SEQ ID NO: 4675 - RNA, 22 nt, Artificial Sequence
  Description of Artificial Sequence: Synthetic oligonucleotide
cacggucaaauucagauuuagc

SEQ ID NO: 4676 - RNA, 22 nt, Artificial Sequence
  Description of Artificial Sequence: Synthetic oligonucleotide
ucacggucaaauucagauuuag

SEQ ID NO: 4677 - RNA, 22 nt, Artificial Sequence
  Description of Artificial Sequence: Synthetic oligonucleotide
cggucaaauucagauuuagcca

SEQ ID NO: 4678 - RNA, 22 nt, Artificial Sequence
  Description of Artificial Sequence: Synthetic oligonucleotide
acggucaaauucagauuuagcc

SEQ ID NO: 4679 - RNA, 22 nt, Artificial Sequence
  Description of Artificial Sequence: Synthetic oligonucleotide
gucaaauucagauuuagccaca

SEQ ID NO: 4680 - RNA, 22 nt, Artificial Sequence
  Description of Artificial Sequence: Synthetic oligonucleotide
ggucaaauucagauuuagccac

SEQ ID NO: 4681 - RNA, 22 nt, Artificial Sequence
  Description of Artificial Sequence: Synthetic oligonucleotide
caaauucagauuuagccacauu

SEQ ID NO: 4682 - RNA, 22 nt, Artificial Sequence
  Description of Artificial Sequence: Synthetic oligonucleotide
ucaaauucagauuuagccacau

SEQ ID NO: 4683 - RNA, 22 nt, Artificial Sequence
  Description of Artificial Sequence: Synthetic oligonucleotide
guauuauuggguaaaccuuggg

SEQ ID NO: 4684 - RNA, 22 nt, Artificial Sequence
  Description of Artificial Sequence: Synthetic oligonucleotide
aguauuauuggguaaaccuugg

SEQ ID NO: 4685 - RNA, 22 nt, Artificial Sequence
  Description of Artificial Sequence: Synthetic oligonucleotide
guuccgaggaacaugucuggac

SEQ ID NO: 4686 - RNA, 22 nt, Artificial Sequence
  Description of Artificial Sequence: Synthetic oligonucleotide
aguuccgaggaacaugucugga

SEQ ID NO: 4687 - RNA, 22 nt, Artificial Sequence
  Description of Artificial Sequence: Synthetic oligonucleotide
uauuggguaaaccuuggggccg

SEQ ID NO: 4688 - RNA, 22 nt, Artificial Sequence
  Description of Artificial Sequence: Synthetic oligonucleotide
uuauuggguaaaccuuggggcc

SEQ ID NO: 4689 - RNA, 22 nt, Artificial Sequence
  Description of Artificial Sequence: Synthetic oligonucleotide
aggaacaugucuggaccuauag

SEQ ID NO: 4690 - RNA, 22 nt, Artificial Sequence
  Description of Artificial Sequence: Synthetic oligonucleotide
gaacaugucuggaccuauaguu

SEQ ID NO: 4691 - RNA, 22 nt, Artificial Sequence
  Description of Artificial Sequence: Synthetic oligonucleotide
uccgaggaacaugucuggaccu

SEQ ID NO: 4692 - RNA, 22 nt, Artificial Sequence
  Description of Artificial Sequence: Synthetic oligonucleotide
uuccgaggaacaugucuggacc

SEQ ID NO: 4693 - RNA, 22 nt, Artificial Sequence
  Description of Artificial Sequence: Synthetic oligonucleotide
cgaggaacaugucuggaccuau

SEQ ID NO: 4694 - RNA, 22 nt, Artificial Sequence
  Description of Artificial Sequence: Synthetic oligonucleotide
ccgaggaacaugucuggaccua

SEQ ID NO: 4695 - RNA, 22 nt, Artificial Sequence
  Description of Artificial Sequence: Synthetic oligonucleotide
aaacauuaaaguuugcacaaug

SEQ ID NO: 4696 - RNA, 22 nt, Artificial Sequence
  Description of Artificial Sequence: Synthetic oligonucleotide
cauuaaaguuugcacaaugcag

SEQ ID NO: 4697 - RNA, 22 nt, Artificial Sequence
  Description of Artificial Sequence: Synthetic oligonucleotide
acauuaaaguuugcacaaugca

SEQ ID NO: 4698 - RNA, 22 nt, Artificial Sequence
  Description of Artificial Sequence: Synthetic oligonucleotide
auaaaacauuaaaguuugcaca

SEQ ID NO: 4699 - RNA, 22 nt, Artificial Sequence
  Description of Artificial Sequence: Synthetic oligonucleotide
aauaaaacauuaaaguuugcac

SEQ ID NO: 4700 - RNA, 22 nt, Artificial Sequence
  Description of Artificial Sequence: Synthetic oligonucleotide
aaaacauuaaaguuugcacaau

SEQ ID NO: 4701 - RNA, 22 nt, Artificial Sequence
  Description of Artificial Sequence: Synthetic oligonucleotide
ucuuugucauccaauuugaugg

SEQ ID NO: 4702 - RNA, 22 nt, Artificial Sequence
  Description of Artificial Sequence: Synthetic oligonucleotide
cuuugucauccaauuugauggc

SEQ ID NO: 4703 - RNA, 22 nt, Artificial Sequence
  Description of Artificial Sequence: Synthetic oligonucleotide
aucuuugucauccaauuugaug

SEQ ID NO: 4704 - RNA, 22 nt, Artificial Sequence
  Description of Artificial Sequence: Synthetic oligonucleotide
aaguuuacauccugauuaugua

SEQ ID NO: 4705 - RNA, 22 nt, Artificial Sequence
  Description of Artificial Sequence: Synthetic oligonucleotide
uuugagugaauaugacauaguc

SEQ ID NO: 4706 - RNA, 22 nt, Artificial Sequence
  Description of Artificial Sequence: Synthetic oligonucleotide
guuugagugaauaugacauagu

SEQ ID NO: 4707 - RNA, 22 nt, Artificial Sequence
  Description of Artificial Sequence: Synthetic oligonucleotide
ugagugaauaugacauagucau

SEQ ID NO: 4708 - RNA, 22 nt, Artificial Sequence
  Description of Artificial Sequence: Synthetic oligonucleotide
uugagugaauaugacauaguca

SEQ ID NO: 4709 - RNA, 22 nt, Artificial Sequence
  Description of Artificial Sequence: Synthetic oligonucleotide
agugaauaugacauagucauau

SEQ ID NO: 4710 - RNA, 22 nt, Artificial Sequence
  Description of Artificial Sequence: Synthetic oligonucleotide
gagugaauaugacauagucaua

SEQ ID NO: 4711 - RNA, 22 nt, Artificial Sequence
  Description of Artificial Sequence: Synthetic oligonucleotide
ugaauaugacauagucauauuc

SEQ ID NO: 4712 - RNA, 22 nt, Artificial Sequence
  Description of Artificial Sequence: Synthetic oligonucleotide
gugaauaugacauagucauauu

SEQ ID NO: 4713 - RNA, 22 nt, Artificial Sequence
  Description of Artificial Sequence: Synthetic oligonucleotide
uaccauaccucuauuuagguug

SEQ ID NO: 4714 - RNA, 22 nt, Artificial Sequence
  Description of Artificial Sequence: Synthetic oligonucleotide
accauaccucuauuuagguugu

SEQ ID NO: 4715 - RNA, 22 nt, Artificial Sequence
  Description of Artificial Sequence: Synthetic oligonucleotide
aguaccauaccucuauuuaggu

SEQ ID NO: 4716 - RNA, 22 nt, Artificial Sequence
  Description of Artificial Sequence: Synthetic oligonucleotide
guaccauaccucuauuuagguu

SEQ ID NO: 4717 - RNA, 22 nt, Artificial Sequence
  Description of Artificial Sequence: Synthetic oligonucleotide
auaccucuauuuagguuguuua

SEQ ID NO: 4718 - RNA, 22 nt, Artificial Sequence
  Description of Artificial Sequence: Synthetic oligonucleotide
uaccucuauuuagguuguuuaa

SEQ ID NO: 4719 - RNA, 22 nt, Artificial Sequence
  Description of Artificial Sequence: Synthetic oligonucleotide
ccauaccucuauuuagguuguu

SEQ ID NO: 4720 - RNA, 22 nt, Artificial Sequence
  Description of Artificial Sequence: Synthetic oligonucleotide
cauaccucuauuuagguuguuu

SEQ ID NO: 4721 - RNA, 22 nt, Artificial Sequence
  Description of Artificial Sequence: Synthetic oligonucleotide
uuaccggguuugacaguuugaa

SEQ ID NO: 4722 - RNA, 22 nt, Artificial Sequence
  Description of Artificial Sequence: Synthetic oligonucleotide
auuaccggguuugacaguuuga

SEQ ID NO: 4723 - RNA, 22 nt, Artificial Sequence
  Description of Artificial Sequence: Synthetic oligonucleotide
gguuugacaguuugaaaagcaa

SEQ ID NO: 4724 - RNA, 22 nt, Artificial Sequence
  Description of Artificial Sequence: Synthetic oligonucleotide
uuugacaguuugaaaagcaaca

SEQ ID NO: 4725 - RNA, 22 nt, Artificial Sequence
  Description of Artificial Sequence: Synthetic oligonucleotide
guuugacaguuugaaaagcaac

SEQ ID NO: 4726 - RNA, 22 nt, Artificial Sequence
  Description of Artificial Sequence: Synthetic oligonucleotide
accggguuugacaguuugaaaa

SEQ ID NO: 4727 - RNA, 22 nt, Artificial Sequence
  Description of Artificial Sequence: Synthetic oligonucleotide
uaccggguuugacaguuugaaa

SEQ ID NO: 4728 - RNA, 22 nt, Artificial Sequence
  Description of Artificial Sequence: Synthetic oligonucleotide
ccggguuugacaguuugaaaag

SEQ ID NO: 4729 - RNA, 22 nt, Artificial Sequence
  Description of Artificial Sequence: Synthetic oligonucleotide
aauaagccauccgaaagggagu

SEQ ID NO: 4730 - RNA, 22 nt, Artificial Sequence
  Description of Artificial Sequence: Synthetic oligonucleotide
auaagccauccgaaagggagug

SEQ ID NO: 4731 - RNA, 22 nt, Artificial Sequence
  Description of Artificial Sequence: Synthetic oligonucleotide
ccaaaauuggagcuaaguuguu

SEQ ID NO: 4732 - RNA, 22 nt, Artificial Sequence
  Description of Artificial Sequence: Synthetic oligonucleotide
accaaaauuggagcuaaguugu

SEQ ID NO: 4733 - RNA, 22 nt, Artificial Sequence
  Description of Artificial Sequence: Synthetic oligonucleotide
uggagcuaaguuguuuaacaag

SEQ ID NO: 4734 - RNA, 22 nt, Artificial Sequence
  Description of Artificial Sequence: Synthetic oligonucleotide
uuggagcuaaguuguuuaacaa

SEQ ID NO: 4735 - RNA, 22 nt, Artificial Sequence
  Description of Artificial Sequence: Synthetic oligonucleotide
auuggagcuaaguuguuuaaca

SEQ ID NO: 4736 - RNA, 22 nt, Artificial Sequence
  Description of Artificial Sequence: Synthetic oligonucleotide
aauuggagcuaaguuguuuaac

SEQ ID NO: 4737 - RNA, 22 nt, Artificial Sequence
  Description of Artificial Sequence: Synthetic oligonucleotide
aaauuggagcuaaguuguuuaa

SEQ ID NO: 4738 - RNA, 22 nt, Artificial Sequence
  Description of Artificial Sequence: Synthetic oligonucleotide
aaaauuggagcuaaguuguuua

SEQ ID NO: 4739 - RNA, 22 nt, Artificial Sequence
  Description of Artificial Sequence: Synthetic oligonucleotide
caaaauuggagcuaaguuguuu

SEQ ID NO: 4740 - RNA, 22 nt, Artificial Sequence
  Description of Artificial Sequence: Synthetic oligonucleotide
uuaacaauauugcagcaguacg

SEQ ID NO: 4741 - RNA, 22 nt, Artificial Sequence
  Description of Artificial Sequence: Synthetic oligonucleotide
uaacaauauugcagcaguacgc

SEQ ID NO: 4742 - RNA, 22 nt, Artificial Sequence
  Description of Artificial Sequence: Synthetic oligonucleotide
gacucacguuaacaauauugca

SEQ ID NO: 4743 - RNA, 22 nt, Artificial Sequence
  Description of Artificial Sequence: Synthetic oligonucleotide
acucacguuaacaauauugcag

SEQ ID NO: 4744 - RNA, 22 nt, Artificial Sequence
  Description of Artificial Sequence: Synthetic oligonucleotide
aucacggucaaauucagauuua

SEQ ID NO: 4745 - RNA, 22 nt, Artificial Sequence
  Description of Artificial Sequence: Synthetic oligonucleotide
caucacggucaaauucagauuu

SEQ ID NO: 4746 - RNA, 22 nt, Artificial Sequence
  Description of Artificial Sequence: Synthetic oligonucleotide
ggcuaaaaagcacaaauagaag

SEQ ID NO: 4747 - RNA, 22 nt, Artificial Sequence
  Description of Artificial Sequence: Synthetic oligonucleotide
gcuaaaaagcacaaauagaagu

SEQ ID NO: 4748 - RNA, 22 nt, Artificial Sequence
  Description of Artificial Sequence: Synthetic oligonucleotide
cuaaaaagcacaaauagaaguc

SEQ ID NO: 4749 - RNA, 22 nt, Artificial Sequence
  Description of Artificial Sequence: Synthetic oligonucleotide
uaaaaagcacaaauagaaguca

SEQ ID NO: 4750 - RNA, 22 nt, Artificial Sequence
  Description of Artificial Sequence: Synthetic oligonucleotide
aaaaagcacaaauagaagucaa

SEQ ID NO: 4751 - RNA, 22 nt, Artificial Sequence
  Description of Artificial Sequence: Synthetic oligonucleotide
aaaagcacaaauagaagucaau

SEQ ID NO: 4752 - RNA, 22 nt, Artificial Sequence
  Description of Artificial Sequence: Synthetic oligonucleotide
aaagcacaaauagaagucaauu

SEQ ID NO: 4753 - RNA, 22 nt, Artificial Sequence
  Description of Artificial Sequence: Synthetic oligonucleotide
aagcacaaauagaagucaauua

SEQ ID NO: 4754 - RNA, 22 nt, Artificial Sequence
  Description of Artificial Sequence: Synthetic oligonucleotide
aaggcuaaaaagcacaaauaga

SEQ ID NO: 4755 - RNA, 22 nt, Artificial Sequence
  Description of Artificial Sequence: Synthetic oligonucleotide
aggcuaaaaagcacaaauagaa

SEQ ID NO: 4756 - RNA, 22 nt, Artificial Sequence
  Description of Artificial Sequence: Synthetic oligonucleotide
aggauugcgggugccaauguga

SEQ ID NO: 4757 - RNA, 22 nt, Artificial Sequence
  Description of Artificial Sequence: Synthetic oligonucleotide
ggauugcgggugccaaugugau

SEQ ID NO: 4758 - RNA, 22 nt, Artificial Sequence
  Description of Artificial Sequence: Synthetic oligonucleotide
caggauugcgggugccaaugug

SEQ ID NO: 4759 - RNA, 22 nt, Artificial Sequence
  Description of Artificial Sequence: Synthetic oligonucleotide
uugcgggugccaaugugaucuu

SEQ ID NO: 4760 - RNA, 22 nt, Artificial Sequence
  Description of Artificial Sequence: Synthetic oligonucleotide
ugcgggugccaaugugaucuuu

SEQ ID NO: 4761 - RNA, 22 nt, Artificial Sequence
  Description of Artificial Sequence: Synthetic oligonucleotide
gauugcgggugccaaugugauc

SEQ ID NO: 4762 - RNA, 22 nt, Artificial Sequence
  Description of Artificial Sequence: Synthetic oligonucleotide
auugcgggugccaaugugaucu

SEQ ID NO: 4763 - RNA, 22 nt, Artificial Sequence
  Description of Artificial Sequence: Synthetic oligonucleotide
guaauucuaacauagugcucuu

SEQ ID NO: 4764 - RNA, 22 nt, Artificial Sequence
  Description of Artificial Sequence: Synthetic oligonucleotide
uaauucuaacauagugcucuug

SEQ ID NO: 4765 - RNA, 22 nt, Artificial Sequence
  Description of Artificial Sequence: Synthetic oligonucleotide
uucuaacauagugcucuugugg

SEQ ID NO: 4766 - RNA, 22 nt, Artificial Sequence
  Description of Artificial Sequence: Synthetic oligonucleotide
ucuaacauagugcucuuguggc

SEQ ID NO: 4767 - RNA, 22 nt, Artificial Sequence
  Description of Artificial Sequence: Synthetic oligonucleotide
aauucuaacauagugcucuugu

SEQ ID NO: 4768 - RNA, 22 nt, Artificial Sequence
  Description of Artificial Sequence: Synthetic oligonucleotide
auucuaacauagugcucuugug

SEQ ID NO: 4769 - RNA, 22 nt, Artificial Sequence
  Description of Artificial Sequence: Synthetic oligonucleotide
aacauagugcucuuguggcacu

SEQ ID NO: 4770 - RNA, 22 nt, Artificial Sequence
  Description of Artificial Sequence: Synthetic oligonucleotide
acauagugcucuuguggcacua

SEQ ID NO: 4771 - RNA, 22 nt, Artificial Sequence
  Description of Artificial Sequence: Synthetic oligonucleotide
cuaacauagugcucuuguggca

SEQ ID NO: 4772 - RNA, 22 nt, Artificial Sequence
  Description of Artificial Sequence: Synthetic oligonucleotide
uaacauagugcucuuguggcac

SEQ ID NO: 4773 - RNA, 22 nt, Artificial Sequence
  Description of Artificial Sequence: Synthetic oligonucleotide
uccucaguagcuuugagcguuu

SEQ ID NO: 4774 - RNA, 22 nt, Artificial Sequence
  Description of Artificial Sequence: Synthetic oligonucleotide
ccucaguagcuuugagcguuuc

SEQ ID NO: 4775 - RNA, 22 nt, Artificial Sequence
  Description of Artificial Sequence: Synthetic oligonucleotide
cucaguagcuuugagcguuucu

SEQ ID NO: 4776 - RNA, 22 nt, Artificial Sequence
  Description of Artificial Sequence: Synthetic oligonucleotide
ucaguagcuuugagcguuucug

SEQ ID NO: 4777 - RNA, 22 nt, Artificial Sequence
  Description of Artificial Sequence: Synthetic oligonucleotide
caguagcuuugagcguuucugc

SEQ ID NO: 4778 - RNA, 22 nt, Artificial Sequence
  Description of Artificial Sequence: Synthetic oligonucleotide
aguagcuuugagcguuucugcu

SEQ ID NO: 4779 - RNA, 22 nt, Artificial Sequence
  Description of Artificial Sequence: Synthetic oligonucleotide
guagcuuugagcguuucugcug

SEQ ID NO: 4780 - RNA, 22 nt, Artificial Sequence
  Description of Artificial Sequence: Synthetic oligonucleotide
uagcuuugagcguuucugcugc

SEQ ID NO: 4781 - RNA, 22 nt, Artificial Sequence
  Description of Artificial Sequence: Synthetic oligonucleotide
uaacaccuguagaaaaaccuag

SEQ ID NO: 4782 - RNA, 22 nt, Artificial Sequence
  Description of Artificial Sequence: Synthetic oligonucleotide
uuaacaccuguagaaaaaccua

SEQ ID NO: 4783 - RNA, 22 nt, Artificial Sequence
  Description of Artificial Sequence: Synthetic oligonucleotide
acaccuguagaaaaaccuagcu

SEQ ID NO: 4784 - RNA, 22 nt, Artificial Sequence
  Description of Artificial Sequence: Synthetic oligonucleotide
aacaccuguagaaaaaccuagc

SEQ ID NO: 4785 - RNA, 22 nt, Artificial Sequence
  Description of Artificial Sequence: Synthetic oligonucleotide
caccuguagaaaaaccuagcug

SEQ ID NO: 4786 - RNA, 22 nt, Artificial Sequence
  Description of Artificial Sequence: Synthetic oligonucleotide
cuacaaggugguuccaguucug

SEQ ID NO: 4787 - RNA, 22 nt, Artificial Sequence
  Description of Artificial Sequence: Synthetic oligonucleotide
ccuacaaggugguuccaguucu

SEQ ID NO: 4788 - RNA, 22 nt, Artificial Sequence
  Description of Artificial Sequence: Synthetic oligonucleotide
accuacaaggugguuccaguuc

SEQ ID NO: 4789 - RNA, 22 nt, Artificial Sequence
  Description of Artificial Sequence: Synthetic oligonucleotide
aaccuacaaggugguuccaguu

SEQ ID NO: 4790 - RNA, 22 nt, Artificial Sequence
  Description of Artificial Sequence: Synthetic oligonucleotide
aaaccuacaaggugguuccagu

SEQ ID NO: 4791 - RNA, 22 nt, Artificial Sequence
  Description of Artificial Sequence: Synthetic oligonucleotide
caaaccuacaaggugguuccag

SEQ ID NO: 4792 - RNA, 22 nt, Artificial Sequence
  Description of Artificial Sequence: Synthetic oligonucleotide
acaaaccuacaaggugguucca

SEQ ID NO: 4793 - RNA, 22 nt, Artificial Sequence
  Description of Artificial Sequence: Synthetic oligonucleotide
aacaaaccuacaaggugguucc

SEQ ID NO: 4794 - RNA, 22 nt, Artificial Sequence
  Description of Artificial Sequence: Synthetic oligonucleotide
uaacaaaccuacaaggugguuc

SEQ ID NO: 4795 - RNA, 22 nt, Artificial Sequence
  Description of Artificial Sequence: Synthetic oligonucleotide
guaacaaaccuacaaggugguu

SEQ ID NO: 4796 - RNA, 22 nt, Artificial Sequence
  Description of Artificial Sequence: Synthetic oligonucleotide
acaaaaguuagcagcuucacca

SEQ ID NO: 4797 - RNA, 22 nt, Artificial Sequence
  Description of Artificial Sequence: Synthetic oligonucleotide
caaaaguuagcagcuucaccag

SEQ ID NO: 4798 - RNA, 22 nt, Artificial Sequence
  Description of Artificial Sequence: Synthetic oligonucleotide
agccaaauguaccauggccauu

SEQ ID NO: 4799 - RNA, 22 nt, Artificial Sequence
  Description of Artificial Sequence: Synthetic oligonucleotide
gccaaauguaccauggccauuu

SEQ ID NO: 4800 - RNA, 22 nt, Artificial Sequence
  Description of Artificial Sequence: Synthetic oligonucleotide
gauggaucuggguaaggaaggu

SEQ ID NO: 4801 - RNA, 22 nt, Artificial Sequence
  Description of Artificial Sequence: Synthetic oligonucleotide
ugauggaucuggguaaggaagg

SEQ ID NO: 4802 - RNA, 22 nt, Artificial Sequence
  Description of Artificial Sequence: Synthetic oligonucleotide
gaucuggguaaggaagguacac

SEQ ID NO: 4803 - RNA, 22 nt, Artificial Sequence
  Description of Artificial Sequence: Synthetic oligonucleotide
ggaucuggguaaggaagguaca

SEQ ID NO: 4804 - RNA, 22 nt, Artificial Sequence
  Description of Artificial Sequence: Synthetic oligonucleotide
uggaucuggguaaggaagguac

SEQ ID NO: 4805 - RNA, 22 nt, Artificial Sequence
  Description of Artificial Sequence: Synthetic oligonucleotide
auggaucuggguaaggaaggua

SEQ ID NO: 4806 - RNA, 22 nt, Artificial Sequence
  Description of Artificial Sequence: Synthetic oligonucleotide
caaaugaaucugcauagacauu

SEQ ID NO: 4807 - RNA, 22 nt, Artificial Sequence
  Description of Artificial Sequence: Synthetic oligonucleotide
uacaaaugaaucugcauagaca

SEQ ID NO: 4808 - RNA, 22 nt, Artificial Sequence
  Description of Artificial Sequence: Synthetic oligonucleotide
acaaaugaaucugcauagacau

SEQ ID NO: 4809 - RNA, 22 nt, Artificial Sequence
  Description of Artificial Sequence: Synthetic oligonucleotide
uacuucuaguaaaaguacacaa

SEQ ID NO: 4810 - RNA, 22 nt, Artificial Sequence
  Description of Artificial Sequence: Synthetic oligonucleotide
guacuucuaguaaaaguacaca

SEQ ID NO: 4811 - RNA, 22 nt, Artificial Sequence
  Description of Artificial Sequence: Synthetic oligonucleotide
uucuaguaaaaguacacaauug

SEQ ID NO: 4812 - RNA, 22 nt, Artificial Sequence
  Description of Artificial Sequence: Synthetic oligonucleotide
cuucuaguaaaaguacacaauu

SEQ ID NO: 4813 - RNA, 22 nt, Artificial Sequence
  Description of Artificial Sequence: Synthetic oligonucleotide
acuucuaguaaaaguacacaau

SEQ ID NO: 4814 - RNA, 22 nt, Artificial Sequence
  Description of Artificial Sequence: Synthetic oligonucleotide
ugagagcggugaaccaagacgc

SEQ ID NO: 4815 - RNA, 22 nt, Artificial Sequence
  Description of Artificial Sequence: Synthetic oligonucleotide
agagcggugaaccaagacgcag

SEQ ID NO: 4816 - RNA, 22 nt, Artificial Sequence
  Description of Artificial Sequence: Synthetic oligonucleotide
ugguaugucugaucccaauauu

SEQ ID NO: 4817 - RNA, 22 nt, Artificial Sequence
  Description of Artificial Sequence: Synthetic oligonucleotide
gguaugucugaucccaauauuu

SEQ ID NO: 4818 - RNA, 22 nt, Artificial Sequence
  Description of Artificial Sequence: Synthetic oligonucleotide
auaaaacucagguucccaauac

SEQ ID NO: 4819 - RNA, 22 nt, Artificial Sequence
  Description of Artificial Sequence: Synthetic oligonucleotide
cauaaaacucagguucccaaua

SEQ ID NO: 4820 - RNA, 22 nt, Artificial Sequence
  Description of Artificial Sequence: Synthetic oligonucleotide
uauugguguuaauuggaacgcc

SEQ ID NO: 4821 - RNA, 22 nt, Artificial Sequence
  Description of Artificial Sequence: Synthetic oligonucleotide
cuauugguguuaauuggaacgc

SEQ ID NO: 4822 - RNA, 22 nt, Artificial Sequence
  Description of Artificial Sequence: Synthetic oligonucleotide
gauucauuugaguuauaguagg

SEQ ID NO: 4823 - RNA, 22 nt, Artificial Sequence
  Description of Artificial Sequence: Synthetic oligonucleotide
auucauuugaguuauaguaggg

SEQ ID NO: 4824 - RNA, 22 nt, Artificial Sequence
  Description of Artificial Sequence: Synthetic oligonucleotide
cauuugaguuauaguagggaug

SEQ ID NO: 4825 - RNA, 22 nt, Artificial Sequence
  Description of Artificial Sequence: Synthetic oligonucleotide
auuugaguuauaguagggauga

SEQ ID NO: 4826 - RNA, 22 nt, Artificial Sequence
  Description of Artificial Sequence: Synthetic oligonucleotide
uucauuugaguuauaguaggga

SEQ ID NO: 4827 - RNA, 22 nt, Artificial Sequence
  Description of Artificial Sequence: Synthetic oligonucleotide
ucauuugaguuauaguagggau

SEQ ID NO: 4828 - RNA, 22 nt, Artificial Sequence
  Description of Artificial Sequence: Synthetic oligonucleotide
ugaguuauaguagggaugacau

SEQ ID NO: 4829 - RNA, 22 nt, Artificial Sequence
  Description of Artificial Sequence: Synthetic oligonucleotide
gaguuauaguagggaugacauu

SEQ ID NO: 4830 - RNA, 22 nt, Artificial Sequence
  Description of Artificial Sequence: Synthetic oligonucleotide
uuugaguuauaguagggaugac

SEQ ID NO: 4831 - RNA, 22 nt, Artificial Sequence
  Description of Artificial Sequence: Synthetic oligonucleotide
uugaguuauaguagggaugaca

SEQ ID NO: 4832 - RNA, 22 nt, Artificial Sequence
  Description of Artificial Sequence: Synthetic oligonucleotide
ggaacaugucuggaccuauagu

SEQ ID NO: 4833 - RNA, 22 nt, Artificial Sequence
  Description of Artificial Sequence: Synthetic oligonucleotide
cauuaccauccugagcaaagaa

SEQ ID NO: 4834 - RNA, 22 nt, Artificial Sequence
  Description of Artificial Sequence: Synthetic oligonucleotide
gcauuaccauccugagcaaaga

SEQ ID NO: 4835 - RNA, 22 nt, Artificial Sequence
  Description of Artificial Sequence: Synthetic oligonucleotide
ucagguugcaaaggaucauaaa

SEQ ID NO: 4836 - RNA, 22 nt, Artificial Sequence
  Description of Artificial Sequence: Synthetic oligonucleotide
ugauuaaagauugcuaugugag

SEQ ID NO: 4837 - RNA, 22 nt, Artificial Sequence
  Description of Artificial Sequence: Synthetic oligonucleotide
gauuaaagauugcuaugugaga

SEQ ID NO: 4838 - RNA, 22 nt, Artificial Sequence
  Description of Artificial Sequence: Synthetic oligonucleotide
aagauugcuaugugagauuaaa

SEQ ID NO: 4839 - RNA, 22 nt, Artificial Sequence
  Description of Artificial Sequence: Synthetic oligonucleotide
agauugcuaugugagauuaaag

SEQ ID NO: 4840 - RNA, 22 nt, Artificial Sequence
  Description of Artificial Sequence: Synthetic oligonucleotide
gauugcuaugugagauuaaagu

SEQ ID NO: 4841 - RNA, 22 nt, Artificial Sequence
  Description of Artificial Sequence: Synthetic oligonucleotide
auugcuaugugagauuaaaguu

SEQ ID NO: 4842 - RNA, 22 nt, Artificial Sequence
  Description of Artificial Sequence: Synthetic oligonucleotide
auuaaagauugcuaugugagau

SEQ ID NO: 4843 - RNA, 22 nt, Artificial Sequence
  Description of Artificial Sequence: Synthetic oligonucleotide
uuaaagauugcuaugugagauu

SEQ ID NO: 4844 - RNA, 22 nt, Artificial Sequence
  Description of Artificial Sequence: Synthetic oligonucleotide
uaaagauugcuaugugagauua

SEQ ID NO: 4845 - RNA, 22 nt, Artificial Sequence
  Description of Artificial Sequence: Synthetic oligonucleotide
aaagauugcuaugugagauuaa

SEQ ID NO: 4846 - RNA, 22 nt, Artificial Sequence
  Description of Artificial Sequence: Synthetic oligonucleotide
auucaacagaacuuccuuccuu

SEQ ID NO: 4847 - RNA, 22 nt, Artificial Sequence
  Description of Artificial Sequence: Synthetic oligonucleotide
aauucaacagaacuuccuuccu

SEQ ID NO: 4848 - RNA, 22 nt, Artificial Sequence
  Description of Artificial Sequence: Synthetic oligonucleotide
uucaacagaacuuccuuccuua

SEQ ID NO: 4849 - RNA, 22 nt, Artificial Sequence
  Description of Artificial Sequence: Synthetic oligonucleotide
aacagaacuuccuuccuuaaag

SEQ ID NO: 4850 - RNA, 22 nt, Artificial Sequence
  Description of Artificial Sequence: Synthetic oligonucleotide
caacagaacuuccuuccuuaaa

SEQ ID NO: 4851 - RNA, 22 nt, Artificial Sequence
  Description of Artificial Sequence: Synthetic oligonucleotide
cagaacuuccuuccuuaaagaa

SEQ ID NO: 4852 - RNA, 22 nt, Artificial Sequence
  Description of Artificial Sequence: Synthetic oligonucleotide
acagaacuuccuuccuuaaaga

SEQ ID NO: 4853 - RNA, 22 nt, Artificial Sequence
  Description of Artificial Sequence: Synthetic oligonucleotide
uaauucaacagaacuuccuucc

SEQ ID NO: 4854 - RNA, 22 nt, Artificial Sequence
  Description of Artificial Sequence: Synthetic oligonucleotide
uuaauucaacagaacuuccuuc

SEQ ID NO: 4855 - RNA, 22 nt, Artificial Sequence
  Description of Artificial Sequence: Synthetic oligonucleotide
cgucaggacaagcaaaagcaaa

SEQ ID NO: 4856 - RNA, 22 nt, Artificial Sequence
  Description of Artificial Sequence: Synthetic oligonucleotide
ccgucaggacaagcaaaagcaa

SEQ ID NO: 4857 - RNA, 22 nt, Artificial Sequence
  Description of Artificial Sequence: Synthetic oligonucleotide
gguuuaacauauagugaaccgc

SEQ ID NO: 4858 - RNA, 22 nt, Artificial Sequence
  Description of Artificial Sequence: Synthetic oligonucleotide
ugguuuaacauauagugaaccg

SEQ ID NO: 4859 - RNA, 22 nt, Artificial Sequence
  Description of Artificial Sequence: Synthetic oligonucleotide
cauauagugaaccgccacacau

SEQ ID NO: 4860 - RNA, 22 nt, Artificial Sequence
  Description of Artificial Sequence: Synthetic oligonucleotide
acauauagugaaccgccacaca

SEQ ID NO: 4861 - RNA, 22 nt, Artificial Sequence
  Description of Artificial Sequence: Synthetic oligonucleotide
aacauauagugaaccgccacac

SEQ ID NO: 4862 - RNA, 22 nt, Artificial Sequence
  Description of Artificial Sequence: Synthetic oligonucleotide
uaacauauagugaaccgccaca

SEQ ID NO: 4863 - RNA, 22 nt, Artificial Sequence
  Description of Artificial Sequence: Synthetic oligonucleotide
uuaacauauagugaaccgccac

SEQ ID NO: 4864 - RNA, 22 nt, Artificial Sequence
  Description of Artificial Sequence: Synthetic oligonucleotide
uuuaacauauagugaaccgcca

SEQ ID NO: 4865 - RNA, 22 nt, Artificial Sequence
  Description of Artificial Sequence: Synthetic oligonucleotide
guuuaacauauagugaaccgcc

SEQ ID NO: 4866 - RNA, 22 nt, Artificial Sequence
  Description of Artificial Sequence: Synthetic oligonucleotide
aacauuguucguuuaguuguua

SEQ ID NO: 4867 - RNA, 22 nt, Artificial Sequence
  Description of Artificial Sequence: Synthetic oligonucleotide
aaacauuguucguuuaguuguu

SEQ ID NO: 4868 - RNA, 22 nt, Artificial Sequence
  Description of Artificial Sequence: Synthetic oligonucleotide
uacuacauuuaucuauaggcaa

SEQ ID NO: 4869 - RNA, 22 nt, Artificial Sequence
  Description of Artificial Sequence: Synthetic oligonucleotide
acuacauuuaucuauaggcaaa

SEQ ID NO: 4870 - RNA, 22 nt, Artificial Sequence
  Description of Artificial Sequence: Synthetic oligonucleotide
auuuaucuauaggcaaauauuu

SEQ ID NO: 4871 - RNA, 22 nt, Artificial Sequence
  Description of Artificial Sequence: Synthetic oligonucleotide
acauuuaucuauaggcaaauau

SEQ ID NO: 4872 - RNA, 22 nt, Artificial Sequence
  Description of Artificial Sequence: Synthetic oligonucleotide
cuacauuuaucuauaggcaaau

SEQ ID NO: 4873 - RNA, 22 nt, Artificial Sequence
  Description of Artificial Sequence: Synthetic oligonucleotide
gcauugucugcauagcacuagu

SEQ ID NO: 4874 - RNA, 22 nt, Artificial Sequence
  Description of Artificial Sequence: Synthetic oligonucleotide
agcauugucugcauagcacuag

SEQ ID NO: 4875 - RNA, 22 nt, Artificial Sequence
  Description of Artificial Sequence: Synthetic oligonucleotide
augucauaauacgcaucaccca

SEQ ID NO: 4876 - RNA, 22 nt, Artificial Sequence
  Description of Artificial Sequence: Synthetic oligonucleotide
cgcuauuaacuauuaacguacc

SEQ ID NO: 4877 - RNA, 22 nt, Artificial Sequence
  Description of Artificial Sequence: Synthetic oligonucleotide
gcuauuaacuauuaacguaccu

SEQ ID NO: 4878 - RNA, 22 nt, Artificial Sequence
  Description of Artificial Sequence: Synthetic oligonucleotide
uaacuauuaacguaccugucuc

SEQ ID NO: 4879 - RNA, 22 nt, Artificial Sequence
  Description of Artificial Sequence: Synthetic oligonucleotide
aacuauuaacguaccugucucu

SEQ ID NO: 4880 - RNA, 22 nt, Artificial Sequence
  Description of Artificial Sequence: Synthetic oligonucleotide
acuauuaacguaccugucucuu

SEQ ID NO: 4881 - RNA, 22 nt, Artificial Sequence
  Description of Artificial Sequence: Synthetic oligonucleotide
cuauuaacguaccugucucuuc

SEQ ID NO: 4882 - RNA, 22 nt, Artificial Sequence
  Description of Artificial Sequence: Synthetic oligonucleotide
cuauuaacuauuaacguaccug

SEQ ID NO: 4883 - RNA, 22 nt, Artificial Sequence
  Description of Artificial Sequence: Synthetic oligonucleotide
uauuaacuauuaacguaccugu

SEQ ID NO: 4884 - RNA, 22 nt, Artificial Sequence
  Description of Artificial Sequence: Synthetic oligonucleotide
auuaacuauuaacguaccuguc

SEQ ID NO: 4885 - RNA, 22 nt, Artificial Sequence
  Description of Artificial Sequence: Synthetic oligonucleotide
uuaacuauuaacguaccugucu

SEQ ID NO: 4886 - RNA, 22 nt, Artificial Sequence
  Description of Artificial Sequence: Synthetic oligonucleotide
augaggaacgagaagaggcuug

SEQ ID NO: 4887 - RNA, 22 nt, Artificial Sequence
  Description of Artificial Sequence: Synthetic oligonucleotide
gaugaggaacgagaagaggcuu

SEQ ID NO: 4888 - RNA, 22 nt, Artificial Sequence
  Description of Artificial Sequence: Synthetic oligonucleotide
ugaugaggaacgagaagaggcu

SEQ ID NO: 4889 - RNA, 22 nt, Artificial Sequence
  Description of Artificial Sequence: Synthetic oligonucleotide
gugaugaggaacgagaagaggc

SEQ ID NO: 4890 - RNA, 22 nt, Artificial Sequence
  Description of Artificial Sequence: Synthetic oligonucleotide
cgugaugaggaacgagaagagg

SEQ ID NO: 4891 - RNA, 22 nt, Artificial Sequence
  Description of Artificial Sequence: Synthetic oligonucleotide
acgugaugaggaacgagaagag

SEQ ID NO: 4892 - RNA, 22 nt, Artificial Sequence
  Description of Artificial Sequence: Synthetic oligonucleotide
uacgugaugaggaacgagaaga

SEQ ID NO: 4893 - RNA, 22 nt, Artificial Sequence
  Description of Artificial Sequence: Synthetic oligonucleotide
cuacgugaugaggaacgagaag

SEQ ID NO: 4894 - RNA, 22 nt, Artificial Sequence
  Description of Artificial Sequence: Synthetic oligonucleotide
acuacgugaugaggaacgagaa

SEQ ID NO: 4895 - RNA, 22 nt, Artificial Sequence
  Description of Artificial Sequence: Synthetic oligonucleotide
gacuacgugaugaggaacgaga

SEQ ID NO: 4896 - RNA, 22 nt, Artificial Sequence
  Description of Artificial Sequence: Synthetic oligonucleotide
uuuguucuggaccacgucugcc

SEQ ID NO: 4897 - RNA, 22 nt, Artificial Sequence
  Description of Artificial Sequence: Synthetic oligonucleotide
aaagaucagcauuccaagaaug

SEQ ID NO: 4898 - RNA, 22 nt, Artificial Sequence
  Description of Artificial Sequence: Synthetic oligonucleotide
augacuaaaaucuccauaaacg

SEQ ID NO: 4899 - RNA, 22 nt, Artificial Sequence
  Description of Artificial Sequence: Synthetic oligonucleotide
gacuaaaaucuccauaaacgau

SEQ ID NO: 4900 - RNA, 22 nt, Artificial Sequence
  Description of Artificial Sequence: Synthetic oligonucleotide
ugacuaaaaucuccauaaacga

SEQ ID NO: 4901 - RNA, 22 nt, Artificial Sequence
  Description of Artificial Sequence: Synthetic oligonucleotide
aaucuccauaaacgauauguuc

SEQ ID NO: 4902 - RNA, 22 nt, Artificial Sequence
  Description of Artificial Sequence: Synthetic oligonucleotide
aaaucuccauaaacgauauguu

SEQ ID NO: 4903 - RNA, 22 nt, Artificial Sequence
  Description of Artificial Sequence: Synthetic oligonucleotide
auuaaauggaaaaccagcugau

SEQ ID NO: 4904 - RNA, 22 nt, Artificial Sequence
  Description of Artificial Sequence: Synthetic oligonucleotide
uuaaauggaaaaccagcugauu

SEQ ID NO: 4905 - RNA, 22 nt, Artificial Sequence
  Description of Artificial Sequence: Synthetic oligonucleotide
uaaauggaaaaccagcugauuu

SEQ ID NO: 4906 - RNA, 22 nt, Artificial Sequence
  Description of Artificial Sequence: Synthetic oligonucleotide
uaagaucugaaucgacaagcag

SEQ ID NO: 4907 - RNA, 22 nt, Artificial Sequence
  Description of Artificial Sequence: Synthetic oligonucleotide
uacauagccucauaaaacucag

SEQ ID NO: 4908 - RNA, 22 nt, Artificial Sequence
  Description of Artificial Sequence: Synthetic oligonucleotide
guacauagccucauaaaacuca

SEQ ID NO: 4909 - RNA, 22 nt, Artificial Sequence
  Description of Artificial Sequence: Synthetic oligonucleotide
cauagccucauaaaacucaggu

SEQ ID NO: 4910 - RNA, 22 nt, Artificial Sequence
  Description of Artificial Sequence: Synthetic oligonucleotide
acauagccucauaaaacucagg

SEQ ID NO: 4911 - RNA, 22 nt, Artificial Sequence
  Description of Artificial Sequence: Synthetic oligonucleotide
uagccucauaaaacucagguuc

SEQ ID NO: 4912 - RNA, 22 nt, Artificial Sequence
  Description of Artificial Sequence: Synthetic oligonucleotide
auagccucauaaaacucagguu

SEQ ID NO: 4913 - RNA, 22 nt, Artificial Sequence
  Description of Artificial Sequence: Synthetic oligonucleotide
gccucauaaaacucagguuccc

SEQ ID NO: 4914 - RNA, 22 nt, Artificial Sequence
  Description of Artificial Sequence: Synthetic oligonucleotide
cucauaaaacucagguucccaa

SEQ ID NO: 4915 - RNA, 22 nt, Artificial Sequence
  Description of Artificial Sequence: Synthetic oligonucleotide
ccucauaaaacucagguuccca

SEQ ID NO: 4916 - RNA, 22 nt, Artificial Sequence
  Description of Artificial Sequence: Synthetic oligonucleotide
uuacacauuagggcucuuccau

SEQ ID NO: 4917 - RNA, 22 nt, Artificial Sequence
  Description of Artificial Sequence: Synthetic oligonucleotide
uuuacacauuagggcucuucca

SEQ ID NO: 4918 - RNA, 22 nt, Artificial Sequence
  Description of Artificial Sequence: Synthetic oligonucleotide
acacauuagggcucuuccauau

SEQ ID NO: 4919 - RNA, 22 nt, Artificial Sequence
  Description of Artificial Sequence: Synthetic oligonucleotide
uacacauuagggcucuuccaua

SEQ ID NO: 4920 - RNA, 22 nt, Artificial Sequence
  Description of Artificial Sequence: Synthetic oligonucleotide
auaaguucguuuauguguaaug

SEQ ID NO: 4921 - RNA, 22 nt, Artificial Sequence
  Description of Artificial Sequence: Synthetic oligonucleotide
cauaaguucguuuauguguaau

SEQ ID NO: 4922 - RNA, 22 nt, Artificial Sequence
  Description of Artificial Sequence: Synthetic oligonucleotide
aaguucguuuauguguaaugua

SEQ ID NO: 4923 - RNA, 22 nt, Artificial Sequence
  Description of Artificial Sequence: Synthetic oligonucleotide
uaaguucguuuauguguaaugu

SEQ ID NO: 4924 - RNA, 22 nt, Artificial Sequence
  Description of Artificial Sequence: Synthetic oligonucleotide
ccauaaguucguuuauguguaa

SEQ ID NO: 4925 - RNA, 22 nt, Artificial Sequence
  Description of Artificial Sequence: Synthetic oligonucleotide
uccauaaguucguuuaugugua

SEQ ID NO: 4926 - RNA, 22 nt, Artificial Sequence
  Description of Artificial Sequence: Synthetic oligonucleotide
cucuuccgaaacgaaugaguac

SEQ ID NO: 4927 - RNA, 22 nt, Artificial Sequence
  Description of Artificial Sequence: Synthetic oligonucleotide
ucucuuccgaaacgaaugagua

SEQ ID NO: 4928 - RNA, 22 nt, Artificial Sequence
  Description of Artificial Sequence: Synthetic oligonucleotide
cuuccgaaacgaaugaguacau

SEQ ID NO: 4929 - RNA, 22 nt, Artificial Sequence
  Description of Artificial Sequence: Synthetic oligonucleotide
ucuuccgaaacgaaugaguaca

SEQ ID NO: 4930 - RNA, 22 nt, Artificial Sequence
  Description of Artificial Sequence: Synthetic oligonucleotide
uccgaaacgaaugaguacauaa

SEQ ID NO: 4931 - RNA, 22 nt, Artificial Sequence
  Description of Artificial Sequence: Synthetic oligonucleotide
uuccgaaacgaaugaguacaua

SEQ ID NO: 4932 - RNA, 22 nt, Artificial Sequence
  Description of Artificial Sequence: Synthetic oligonucleotide
cugucucuuccgaaacgaauga

SEQ ID NO: 4933 - RNA, 22 nt, Artificial Sequence
  Description of Artificial Sequence: Synthetic oligonucleotide
ccugucucuuccgaaacgaaug

SEQ ID NO: 4934 - RNA, 22 nt, Artificial Sequence
  Description of Artificial Sequence: Synthetic oligonucleotide
acuucaucacuaauaaauguac

SEQ ID NO: 4935 - RNA, 22 nt, Artificial Sequence
  Description of Artificial Sequence: Synthetic oligonucleotide
cuucaucacuaauaaauguacu

SEQ ID NO: 4936 - RNA, 22 nt, Artificial Sequence
  Description of Artificial Sequence: Synthetic oligonucleotide
caacuucaucacuaauaaaugu

SEQ ID NO: 4937 - RNA, 22 nt, Artificial Sequence
  Description of Artificial Sequence: Synthetic oligonucleotide
aacuucaucacuaauaaaugua

SEQ ID NO: 4938 - RNA, 22 nt, Artificial Sequence
  Description of Artificial Sequence: Synthetic oligonucleotide
gcaacuucaucacuaauaaaug

SEQ ID NO: 4939 - RNA, 22 nt, Artificial Sequence
  Description of Artificial Sequence: Synthetic oligonucleotide
ccacaucaagccuacaagacaa

SEQ ID NO: 4940 - RNA, 22 nt, Artificial Sequence
  Description of Artificial Sequence: Synthetic oligonucleotide
cacaucaagccuacaagacaag

SEQ ID NO: 4941 - RNA, 22 nt, Artificial Sequence
  Description of Artificial Sequence: Synthetic oligonucleotide
agccacaucaagccuacaagac

SEQ ID NO: 4942 - RNA, 22 nt, Artificial Sequence
  Description of Artificial Sequence: Synthetic oligonucleotide
gccacaucaagccuacaagaca

SEQ ID NO: 4943 - RNA, 22 nt, Artificial Sequence
  Description of Artificial Sequence: Synthetic oligonucleotide
gcugagccacaucaagccuaca

SEQ ID NO: 4944 - RNA, 22 nt, Artificial Sequence
  Description of Artificial Sequence: Synthetic oligonucleotide
cugagccacaucaagccuacaa

SEQ ID NO: 4945 - RNA, 22 nt, Artificial Sequence
  Description of Artificial Sequence: Synthetic oligonucleotide
uagcugagccacaucaagccua

SEQ ID NO: 4946 - RNA, 22 nt, Artificial Sequence
  Description of Artificial Sequence: Synthetic oligonucleotide
agcugagccacaucaagccuac

SEQ ID NO: 4947 - RNA, 22 nt, Artificial Sequence
  Description of Artificial Sequence: Synthetic oligonucleotide
guaugccagguaugucaacaca

SEQ ID NO: 4948 - RNA, 22 nt, Artificial Sequence
  Description of Artificial Sequence: Synthetic oligonucleotide
uaugccagguaugucaacacau

SEQ ID NO: 4949 - RNA, 22 nt, Artificial Sequence
  Description of Artificial Sequence: Synthetic oligonucleotide
augccagguaugucaacacaua

SEQ ID NO: 4950 - RNA, 22 nt, Artificial Sequence
  Description of Artificial Sequence: Synthetic oligonucleotide
ugccagguaugucaacacauaa

SEQ ID NO: 4951 - RNA, 22 nt, Artificial Sequence
  Description of Artificial Sequence: Synthetic oligonucleotide
gguaugccagguaugucaacac

SEQ ID NO: 4952 - RNA, 22 nt, Artificial Sequence
  Description of Artificial Sequence: Synthetic oligonucleotide
aauaguaguugucugauaucac

SEQ ID NO: 4953 - RNA, 22 nt, Artificial Sequence
  Description of Artificial Sequence: Synthetic oligonucleotide
uaaaccaaagcacucacagugu

SEQ ID NO: 4954 - RNA, 22 nt, Artificial Sequence
  Description of Artificial Sequence: Synthetic oligonucleotide
agcacucacagugucaacaauu

SEQ ID NO: 4955 - RNA, 22 nt, Artificial Sequence
  Description of Artificial Sequence: Synthetic oligonucleotide
gcacucacagugucaacaauuu

SEQ ID NO: 4956 - RNA, 22 nt, Artificial Sequence
  Description of Artificial Sequence: Synthetic oligonucleotide
aaagcacucacagugucaacaa

SEQ ID NO: 4957 - RNA, 22 nt, Artificial Sequence
  Description of Artificial Sequence: Synthetic oligonucleotide
aagcacucacagugucaacaau

SEQ ID NO: 4958 - RNA, 22 nt, Artificial Sequence
  Description of Artificial Sequence: Synthetic oligonucleotide
ccaaagcacucacagugucaac

SEQ ID NO: 4959 - RNA, 22 nt, Artificial Sequence
  Description of Artificial Sequence: Synthetic oligonucleotide
caaagcacucacagugucaaca

SEQ ID NO: 4960 - RNA, 22 nt, Artificial Sequence
  Description of Artificial Sequence: Synthetic oligonucleotide
aaccaaagcacucacaguguca

SEQ ID NO: 4961 - RNA, 22 nt, Artificial Sequence
  Description of Artificial Sequence: Synthetic oligonucleotide
accaaagcacucacagugucaa

SEQ ID NO: 4962 - RNA, 22 nt, Artificial Sequence
  Description of Artificial Sequence: Synthetic oligonucleotide
gucacaucugugacaucacaac

SEQ ID NO: 4963 - RNA, 22 nt, Artificial Sequence
  Description of Artificial Sequence: Synthetic oligonucleotide
ucacaucugugacaucacaacc

SEQ ID NO: 4964 - RNA, 22 nt, Artificial Sequence
  Description of Artificial Sequence: Synthetic oligonucleotide
cacaucugugacaucacaaccu

SEQ ID NO: 4965 - RNA, 22 nt, Artificial Sequence
  Description of Artificial Sequence: Synthetic oligonucleotide
caggcauauagaccauauuaaa

SEQ ID NO: 4966 - RNA, 22 nt, Artificial Sequence
  Description of Artificial Sequence: Synthetic oligonucleotide
gcaggcauauagaccauauuaa

SEQ ID NO: 4967 - RNA, 22 nt, Artificial Sequence
  Description of Artificial Sequence: Synthetic oligonucleotide
agcaggcauauagaccauauua

SEQ ID NO: 4968 - RNA, 22 nt, Artificial Sequence
  Description of Artificial Sequence: Synthetic oligonucleotide
cuagcaggcauauagaccauau

SEQ ID NO: 4969 - RNA, 22 nt, Artificial Sequence
  Description of Artificial Sequence: Synthetic oligonucleotide
guuucuuggcuaugucagucau

SEQ ID NO: 4970 - RNA, 22 nt, Artificial Sequence
  Description of Artificial Sequence: Synthetic oligonucleotide
gguuucuuggcuaugucaguca

SEQ ID NO: 4971 - RNA, 22 nt, Artificial Sequence
  Description of Artificial Sequence: Synthetic oligonucleotide
uuccacauaccgcagacgguac

SEQ ID NO: 4972 - RNA, 22 nt, Artificial Sequence
  Description of Artificial Sequence: Synthetic oligonucleotide
cauaccgcagacgguacagacu

SEQ ID NO: 4973 - RNA, 22 nt, Artificial Sequence
  Description of Artificial Sequence: Synthetic oligonucleotide
auaaaccaaagcacucacagug

SEQ ID NO: 4974 - RNA, 22 nt, Artificial Sequence
  Description of Artificial Sequence: Synthetic oligonucleotide
ucauaaaccaaagcacucacag

SEQ ID NO: 4975 - RNA, 22 nt, Artificial Sequence
  Description of Artificial Sequence: Synthetic oligonucleotide
cuacgaccguacugaaugccuu

SEQ ID NO: 4976 - RNA, 22 nt, Artificial Sequence
  Description of Artificial Sequence: Synthetic oligonucleotide
uacgaccguacugaaugccuuc

SEQ ID NO: 4977 - RNA, 22 nt, Artificial Sequence
  Description of Artificial Sequence: Synthetic oligonucleotide
cacuacgaccguacugaaugcc

SEQ ID NO: 4978 - RNA, 22 nt, Artificial Sequence
  Description of Artificial Sequence: Synthetic oligonucleotide
aaagaacugacuuaaaguucuu

SEQ ID NO: 4979 - RNA, 22 nt, Artificial Sequence
  Description of Artificial Sequence: Synthetic oligonucleotide
auaaagaacugacuuaaaguuc

SEQ ID NO: 4980 - RNA, 22 nt, Artificial Sequence
  Description of Artificial Sequence: Synthetic oligonucleotide
uaaagaacugacuuaaaguucu

SEQ ID NO: 4981 - RNA, 22 nt, Artificial Sequence
  Description of Artificial Sequence: Synthetic oligonucleotide
uaauaaagaacugacuuaaagu

SEQ ID NO: 4982 - RNA, 22 nt, Artificial Sequence
  Description of Artificial Sequence: Synthetic oligonucleotide
aauaaagaacugacuuaaaguu

SEQ ID NO: 4983 - RNA, 22 nt, Artificial Sequence
  Description of Artificial Sequence: Synthetic oligonucleotide
ccuuuaucagaaccagcaccaa

SEQ ID NO: 4984 - RNA, 22 nt, Artificial Sequence
  Description of Artificial Sequence: Synthetic oligonucleotide
gccauuguguauuuaguaagac

SEQ ID NO: 4985 - RNA, 22 nt, Artificial Sequence
  Description of Artificial Sequence: Synthetic oligonucleotide
ccauuguguauuuaguaagacg

SEQ ID NO: 4986 - RNA, 22 nt, Artificial Sequence
  Description of Artificial Sequence: Synthetic oligonucleotide
uaggcauggcucuaucacauuu

SEQ ID NO: 4987 - RNA, 22 nt, Artificial Sequence
  Description of Artificial Sequence: Synthetic oligonucleotide
acauuagggcucuuccauauag

SEQ ID NO: 4988 - RNA, 22 nt, Artificial Sequence
  Description of Artificial Sequence: Synthetic oligonucleotide
cugaaaagcacguagugcguuu

SEQ ID NO: 4989 - RNA, 22 nt, Artificial Sequence
  Description of Artificial Sequence: Synthetic oligonucleotide
ugaaaagcacguagugcguuua

SEQ ID NO: 4990 - RNA, 22 nt, Artificial Sequence
  Description of Artificial Sequence: Synthetic oligonucleotide
agcacguagugcguuuaucuag

SEQ ID NO: 4991 - RNA, 22 nt, Artificial Sequence
  Description of Artificial Sequence: Synthetic oligonucleotide
aaagcacguagugcguuuaucu

SEQ ID NO: 4992 - RNA, 22 nt, Artificial Sequence
  Description of Artificial Sequence: Synthetic oligonucleotide
aagcacguagugcguuuaucua

SEQ ID NO: 4993 - RNA, 22 nt, Artificial Sequence
  Description of Artificial Sequence: Synthetic oligonucleotide
gaaaagcacguagugcguuuau

SEQ ID NO: 4994 - RNA, 22 nt, Artificial Sequence
  Description of Artificial Sequence: Synthetic oligonucleotide
aaaagcacguagugcguuuauc

SEQ ID NO: 4995 - RNA, 22 nt, Artificial Sequence
  Description of Artificial Sequence: Synthetic oligonucleotide
caagcauuucucgcaaauucca

SEQ ID NO: 4996 - RNA, 22 nt, Artificial Sequence
  Description of Artificial Sequence: Synthetic oligonucleotide
gcaagcauuucucgcaaauucc

SEQ ID NO: 4997 - RNA, 22 nt, Artificial Sequence
  Description of Artificial Sequence: Synthetic oligonucleotide
aaauauugacacaguugaguau

SEQ ID NO: 4998 - RNA, 22 nt, Artificial Sequence
  Description of Artificial Sequence: Synthetic oligonucleotide
aauauugacacaguugaguaua

SEQ ID NO: 4999 - RNA, 22 nt, Artificial Sequence
  Description of Artificial Sequence: Synthetic oligonucleotide
uuaaauauugacacaguugagu

SEQ ID NO: 5000 - RNA, 22 nt, Artificial Sequence
  Description of Artificial Sequence: Synthetic oligonucleotide
uaaauauugacacaguugagua

SEQ ID NO: 5001 - RNA, 22 nt, Artificial Sequence
  Description of Artificial Sequence: Synthetic oligonucleotide
uuuaaauauugacacaguugag

SEQ ID NO: 5002 - RNA, 22 nt, Artificial Sequence
  Description of Artificial Sequence: Synthetic oligonucleotide
ucggcugcaacacggacgaaac

SEQ ID NO: 5003 - RNA, 22 nt, Artificial Sequence
  Description of Artificial Sequence: Synthetic oligonucleotide
aucggcugcaacacggacgaaa

SEQ ID NO: 5004 - RNA, 22 nt, Artificial Sequence
  Description of Artificial Sequence: Synthetic oligonucleotide
ggcugcaacacggacgaaaccg

SEQ ID NO: 5005 - RNA, 22 nt, Artificial Sequence
  Description of Artificial Sequence: Synthetic oligonucleotide
cggcugcaacacggacgaaacc

SEQ ID NO: 5006 - RNA, 22 nt, Artificial Sequence
  Description of Artificial Sequence: Synthetic oligonucleotide
cugcaacacggacgaaaccgua

SEQ ID NO: 5007 - RNA, 22 nt, Artificial Sequence
  Description of Artificial Sequence: Synthetic oligonucleotide
gcugcaacacggacgaaaccgu

SEQ ID NO: 5008 - RNA, 22 nt, Artificial Sequence
  Description of Artificial Sequence: Synthetic oligonucleotide
gcaacacggacgaaaccguaag

SEQ ID NO: 5009 - RNA, 22 nt, Artificial Sequence
  Description of Artificial Sequence: Synthetic oligonucleotide
ugcaacacggacgaaaccguaa

SEQ ID NO: 5010 - RNA, 22 nt, Artificial Sequence
  Description of Artificial Sequence: Synthetic oligonucleotide
gaucggcugcaacacggacgaa

SEQ ID NO: 5011 - RNA, 22 nt, Artificial Sequence
  Description of Artificial Sequence: Synthetic oligonucleotide
ugaucggcugcaacacggacga

SEQ ID NO: 5012 - RNA, 22 nt, Artificial Sequence
  Description of Artificial Sequence: Synthetic oligonucleotide
aagaaaguacuacuacucugua

SEQ ID NO: 5013 - RNA, 22 nt, Artificial Sequence
  Description of Artificial Sequence: Synthetic oligonucleotide
uaaaaccacucugcaaaacagc

SEQ ID NO: 5014 - RNA, 22 nt, Artificial Sequence
  Description of Artificial Sequence: Synthetic oligonucleotide
cuaaaaccacucugcaaaacag

SEQ ID NO: 5015 - RNA, 22 nt, Artificial Sequence
  Description of Artificial Sequence: Synthetic oligonucleotide
ucucacuagugguccaaaacuu

SEQ ID NO: 5016 - RNA, 22 nt, Artificial Sequence
  Description of Artificial Sequence: Synthetic oligonucleotide
ggaacaccaucaacaaauauuu

SEQ ID NO: 5017 - RNA, 22 nt, Artificial Sequence
  Description of Artificial Sequence: Synthetic oligonucleotide
aacugucuauuggucauaguac

SEQ ID NO: 5018 - RNA, 22 nt, Artificial Sequence
  Description of Artificial Sequence: Synthetic oligonucleotide
acugucuauuggucauaguacu

SEQ ID NO: 5019 - RNA, 22 nt, Artificial Sequence
  Description of Artificial Sequence: Synthetic oligonucleotide
gaaacugucuauuggucauagu

SEQ ID NO: 5020 - RNA, 22 nt, Artificial Sequence
  Description of Artificial Sequence: Synthetic oligonucleotide
aaacugucuauuggucauagua

SEQ ID NO: 5021 - RNA, 22 nt, Artificial Sequence
  Description of Artificial Sequence: Synthetic oligonucleotide
augaaacugucuauuggucaua

SEQ ID NO: 5022 - RNA, 22 nt, Artificial Sequence
  Description of Artificial Sequence: Synthetic oligonucleotide
ugaaacugucuauuggucauag

SEQ ID NO: 5023 - RNA, 22 nt, Artificial Sequence
  Description of Artificial Sequence: Synthetic oligonucleotide
ugaugaaacugucuauugguca

SEQ ID NO: 5024 - RNA, 22 nt, Artificial Sequence
  Description of Artificial Sequence: Synthetic oligonucleotide
gaugaaacugucuauuggucau

SEQ ID NO: 5025 - RNA, 22 nt, Artificial Sequence
  Description of Artificial Sequence: Synthetic oligonucleotide
cgcagacgguacagacuguguu

SEQ ID NO: 5026 - RNA, 22 nt, Artificial Sequence
  Description of Artificial Sequence: Synthetic oligonucleotide
gcagacgguacagacuguguuu

SEQ ID NO: 5027 - RNA, 22 nt, Artificial Sequence
  Description of Artificial Sequence: Synthetic oligonucleotide
uaaguguaaaacccacaggguc

SEQ ID NO: 5028 - RNA, 22 nt, Artificial Sequence
  Description of Artificial Sequence: Synthetic oligonucleotide
aaguguaaaacccacaggguca

SEQ ID NO: 5029 - RNA, 22 nt, Artificial Sequence
  Description of Artificial Sequence: Synthetic oligonucleotide
aguguaaaacccacagggucau

SEQ ID NO: 5030 - RNA, 22 nt, Artificial Sequence
  Description of Artificial Sequence: Synthetic oligonucleotide
guguaaaacccacagggucauu

SEQ ID NO: 5031 - RNA, 22 nt, Artificial Sequence
  Description of Artificial Sequence: Synthetic oligonucleotide
accgcagacgguacagacugug

SEQ ID NO: 5032 - RNA, 22 nt, Artificial Sequence
  Description of Artificial Sequence: Synthetic oligonucleotide
ccgcagacgguacagacugugu

SEQ ID NO: 5033 - RNA, 22 nt, Artificial Sequence
  Description of Artificial Sequence: Synthetic oligonucleotide
ucugcacaagaguagacuauau

SEQ ID NO: 5034 - RNA, 22 nt, Artificial Sequence
  Description of Artificial Sequence: Synthetic oligonucleotide
cugcacaagaguagacuauaua

SEQ ID NO: 5035 - RNA, 22 nt, Artificial Sequence
  Description of Artificial Sequence: Synthetic oligonucleotide
ugcacaagaguagacuauauau

SEQ ID NO: 5036 - RNA, 22 nt, Artificial Sequence
  Description of Artificial Sequence: Synthetic oligonucleotide
gcacaagaguagacuauauauc

SEQ ID NO: 5037 - RNA, 22 nt, Artificial Sequence
  Description of Artificial Sequence: Synthetic oligonucleotide
cacaagaguagacuauauaucg

SEQ ID NO: 5038 - RNA, 22 nt, Artificial Sequence
  Description of Artificial Sequence: Synthetic oligonucleotide
caagaguagacuauauaucgua

SEQ ID NO: 5039 - RNA, 22 nt, Artificial Sequence
  Description of Artificial Sequence: Synthetic oligonucleotide
aagaguagacuauauaucguaa

SEQ ID NO: 5040 - RNA, 22 nt, Artificial Sequence
  Description of Artificial Sequence: Synthetic oligonucleotide
agaguagacuauauaucguaaa

SEQ ID NO: 5041 - RNA, 22 nt, Artificial Sequence
  Description of Artificial Sequence: Synthetic oligonucleotide
gaguagacuauauaucguaaac

SEQ ID NO: 5042 - RNA, 22 nt, Artificial Sequence
  Description of Artificial Sequence: Synthetic oligonucleotide
aauugugcaauuugcggccaau

SEQ ID NO: 5043 - RNA, 22 nt, Artificial Sequence
  Description of Artificial Sequence: Synthetic oligonucleotide
auugugcaauuugcggccaaug

SEQ ID NO: 5044 - RNA, 22 nt, Artificial Sequence
  Description of Artificial Sequence: Synthetic oligonucleotide
caaauugugcaauuugcggcca

SEQ ID NO: 5045 - RNA, 22 nt, Artificial Sequence
  Description of Artificial Sequence: Synthetic oligonucleotide
aaauugugcaauuugcggccaa

SEQ ID NO: 5046 - RNA, 22 nt, Artificial Sequence
  Description of Artificial Sequence: Synthetic oligonucleotide
gugcaauuugcggccaauguuu

SEQ ID NO: 5047 - RNA, 22 nt, Artificial Sequence
  Description of Artificial Sequence: Synthetic oligonucleotide
ugcaauuugcggccaauguuug

SEQ ID NO: 5048 - RNA, 22 nt, Artificial Sequence
  Description of Artificial Sequence: Synthetic oligonucleotide
uugugcaauuugcggccaaugu

SEQ ID NO: 5049 - RNA, 22 nt, Artificial Sequence
  Description of Artificial Sequence: Synthetic oligonucleotide
ugugcaauuugcggccaauguu

SEQ ID NO: 5050 - RNA, 22 nt, Artificial Sequence
  Description of Artificial Sequence: Synthetic oligonucleotide
ggcaaauugugcaauuugcggc

SEQ ID NO: 5051 - RNA, 22 nt, Artificial Sequence
  Description of Artificial Sequence: Synthetic oligonucleotide
gcaaauugugcaauuugcggcc

SEQ ID NO: 5052 - RNA, 22 nt, Artificial Sequence
  Description of Artificial Sequence: Synthetic oligonucleotide
cucuucaacgguaauaguaccg

SEQ ID NO: 5053 - RNA, 22 nt, Artificial Sequence
  Description of Artificial Sequence: Synthetic oligonucleotide
uuacacgauaaccaguaaagac

SEQ ID NO: 5054 - RNA, 22 nt, Artificial Sequence
  Description of Artificial Sequence: Synthetic oligonucleotide
guuacacgauaaccaguaaaga

SEQ ID NO: 5055 - RNA, 22 nt, Artificial Sequence
  Description of Artificial Sequence: Synthetic oligonucleotide
acacgauaaccaguaaagacau

SEQ ID NO: 5056 - RNA, 22 nt, Artificial Sequence
  Description of Artificial Sequence: Synthetic oligonucleotide
uacacgauaaccaguaaagaca

SEQ ID NO: 5057 - RNA, 22 nt, Artificial Sequence
  Description of Artificial Sequence: Synthetic oligonucleotide
uuaguuacacgauaaccaguaa

SEQ ID NO: 5058 - RNA, 22 nt, Artificial Sequence
  Description of Artificial Sequence: Synthetic oligonucleotide
uuuaguuacacgauaaccagua

SEQ ID NO: 5059 - RNA, 22 nt, Artificial Sequence
  Description of Artificial Sequence: Synthetic oligonucleotide
aguuacacgauaaccaguaaag

SEQ ID NO: 5060 - RNA, 22 nt, Artificial Sequence
  Description of Artificial Sequence: Synthetic oligonucleotide
uaguuacacgauaaccaguaaa

SEQ ID NO: 5061 - RNA, 22 nt, Artificial Sequence
  Description of Artificial Sequence: Synthetic oligonucleotide
agaacaacuucagaaucaccau

SEQ ID NO: 5062 - RNA, 22 nt, Artificial Sequence
  Description of Artificial Sequence: Synthetic oligonucleotide
aacaacuucagaaucaccauua

SEQ ID NO: 5063 - RNA, 22 nt, Artificial Sequence
  Description of Artificial Sequence: Synthetic oligonucleotide
acaacuucagaaucaccauuag

SEQ ID NO: 5064 - RNA, 22 nt, Artificial Sequence
  Description of Artificial Sequence: Synthetic oligonucleotide
caacuucagaaucaccauuagc

SEQ ID NO: 5065 - RNA, 22 nt, Artificial Sequence
  Description of Artificial Sequence: Synthetic oligonucleotide
acuucagaaucaccauuagcaa

SEQ ID NO: 5066 - RNA, 22 nt, Artificial Sequence
  Description of Artificial Sequence: Synthetic oligonucleotide
aagcugguguguggaaugcaug

SEQ ID NO: 5067 - RNA, 22 nt, Artificial Sequence
  Description of Artificial Sequence: Synthetic oligonucleotide
aaagcugguguguggaaugcau

SEQ ID NO: 5068 - RNA, 22 nt, Artificial Sequence
  Description of Artificial Sequence: Synthetic oligonucleotide
gauuaacagacaagacuaauuu

SEQ ID NO: 5069 - RNA, 22 nt, Artificial Sequence
  Description of Artificial Sequence: Synthetic oligonucleotide
ccauuagcacacaauggaaaac

SEQ ID NO: 5070 - RNA, 22 nt, Artificial Sequence
  Description of Artificial Sequence: Synthetic oligonucleotide
ccaaaagggcacaaguuuguaa

SEQ ID NO: 5071 - RNA, 22 nt, Artificial Sequence
  Description of Artificial Sequence: Synthetic oligonucleotide
aaaagggcacaaguuuguaaua

SEQ ID NO: 5072 - RNA, 22 nt, Artificial Sequence
  Description of Artificial Sequence: Synthetic oligonucleotide
caaaagggcacaaguuuguaau

SEQ ID NO: 5073 - RNA, 22 nt, Artificial Sequence
  Description of Artificial Sequence: Synthetic oligonucleotide
auauucugguucuagugugccc

SEQ ID NO: 5074 - RNA, 22 nt, Artificial Sequence
  Description of Artificial Sequence: Synthetic oligonucleotide
uauucugguucuagugugcccu

SEQ ID NO: 5075 - RNA, 22 nt, Artificial Sequence
  Description of Artificial Sequence: Synthetic oligonucleotide
aaauauucugguucuagugugc

SEQ ID NO: 5076 - RNA, 22 nt, Artificial Sequence
  Description of Artificial Sequence: Synthetic oligonucleotide
aauauucugguucuagugugcc

SEQ ID NO: 5077 - RNA, 22 nt, Artificial Sequence
  Description of Artificial Sequence: Synthetic oligonucleotide
ugaaauauucugguucuagugu

SEQ ID NO: 5078 - RNA, 22 nt, Artificial Sequence
  Description of Artificial Sequence: Synthetic oligonucleotide
gaaauauucugguucuagugug

SEQ ID NO: 5079 - RNA, 22 nt, Artificial Sequence
  Description of Artificial Sequence: Synthetic oligonucleotide
auugaaauauucugguucuagu

SEQ ID NO: 5080 - RNA, 22 nt, Artificial Sequence
  Description of Artificial Sequence: Synthetic oligonucleotide
uugaaauauucugguucuagug

SEQ ID NO: 5081 - RNA, 22 nt, Artificial Sequence
  Description of Artificial Sequence: Synthetic oligonucleotide
gaauugaaauauucugguucua

SEQ ID NO: 5082 - RNA, 22 nt, Artificial Sequence
  Description of Artificial Sequence: Synthetic oligonucleotide
aauugaaauauucugguucuag

SEQ ID NO: 5083 - RNA, 22 nt, Artificial Sequence
  Description of Artificial Sequence: Synthetic oligonucleotide
ucuuuauacgcacuacauucca

SEQ ID NO: 5084 - RNA, 22 nt, Artificial Sequence
  Description of Artificial Sequence: Synthetic oligonucleotide
aucuuuauacgcacuacauucc

SEQ ID NO: 5085 - RNA, 22 nt, Artificial Sequence
  Description of Artificial Sequence: Synthetic oligonucleotide
guuggaccaaacuguuguccau

SEQ ID NO: 5086 - RNA, 22 nt, Artificial Sequence
  Description of Artificial Sequence: Synthetic oligonucleotide
uuggaccaaacuguuguccaua

SEQ ID NO: 5087 - RNA, 22 nt, Artificial Sequence
  Description of Artificial Sequence: Synthetic oligonucleotide
ccaaacuguuguccauauguca

SEQ ID NO: 5088 - RNA, 22 nt, Artificial Sequence
  Description of Artificial Sequence: Synthetic oligonucleotide
caaacuguuguccauaugucau

SEQ ID NO: 5089 - RNA, 22 nt, Artificial Sequence
  Description of Artificial Sequence: Synthetic oligonucleotide
uggaccaaacuguuguccauau

SEQ ID NO: 5090 - RNA, 22 nt, Artificial Sequence
  Description of Artificial Sequence: Synthetic oligonucleotide
ggaccaaacuguuguccauaug

SEQ ID NO: 5091 - RNA, 22 nt, Artificial Sequence
  Description of Artificial Sequence: Synthetic oligonucleotide
gaccaaacuguuguccauaugu

SEQ ID NO: 5092 - RNA, 22 nt, Artificial Sequence
  Description of Artificial Sequence: Synthetic oligonucleotide
accaaacuguuguccauauguc

SEQ ID NO: 5093 - RNA, 22 nt, Artificial Sequence
  Description of Artificial Sequence: Synthetic oligonucleotide
agacucacguuaacaauauugc

SEQ ID NO: 5094 - RNA, 22 nt, Artificial Sequence
  Description of Artificial Sequence: Synthetic oligonucleotide
cauuuaucuauaggcaaauauu

SEQ ID NO: 5095 - RNA, 22 nt, Artificial Sequence
  Description of Artificial Sequence: Synthetic oligonucleotide
caacaucucuauuucuauagag

SEQ ID NO: 5096 - RNA, 22 nt, Artificial Sequence
  Description of Artificial Sequence: Synthetic oligonucleotide
ucaacaucucuauuucuauaga

SEQ ID NO: 5097 - RNA, 22 nt, Artificial Sequence
  Description of Artificial Sequence: Synthetic oligonucleotide
aucucuauuucuauagagacac

SEQ ID NO: 5098 - RNA, 22 nt, Artificial Sequence
  Description of Artificial Sequence: Synthetic oligonucleotide
caucucuauuucuauagagaca

SEQ ID NO: 5099 - RNA, 22 nt, Artificial Sequence
  Description of Artificial Sequence: Synthetic oligonucleotide
acaucucuauuucuauagagac

SEQ ID NO: 5100 - RNA, 22 nt, Artificial Sequence
  Description of Artificial Sequence: Synthetic oligonucleotide
aacaucucuauuucuauagaga

SEQ ID NO: 5101 - RNA, 22 nt, Artificial Sequence
  Description of Artificial Sequence: Synthetic oligonucleotide
agacguacuguggcagcuaaac

SEQ ID NO: 5102 - RNA, 22 nt, Artificial Sequence
  Description of Artificial Sequence: Synthetic oligonucleotide
gacguacuguggcagcuaaacu

SEQ ID NO: 5103 - RNA, 22 nt, Artificial Sequence
  Description of Artificial Sequence: Synthetic oligonucleotide
ucugugaauuauaaggugaaau

SEQ ID NO: 5104 - RNA, 22 nt, Artificial Sequence
  Description of Artificial Sequence: Synthetic oligonucleotide
cguuaacaauauugcagcagua

SEQ ID NO: 5105 - RNA, 22 nt, Artificial Sequence
  Description of Artificial Sequence: Synthetic oligonucleotide
guuaacaauauugcagcaguac

SEQ ID NO: 5106 - RNA, 22 nt, Artificial Sequence
  Description of Artificial Sequence: Synthetic oligonucleotide
cucacguuaacaauauugcagc

SEQ ID NO: 5107 - RNA, 22 nt, Artificial Sequence
  Description of Artificial Sequence: Synthetic oligonucleotide
ucacguuaacaauauugcagca

SEQ ID NO: 5108 - RNA, 22 nt, Artificial Sequence
  Description of Artificial Sequence: Synthetic oligonucleotide
cacguuaacaauauugcagcag

SEQ ID NO: 5109 - RNA, 22 nt, Artificial Sequence
  Description of Artificial Sequence: Synthetic oligonucleotide
acguuaacaauauugcagcagu

SEQ ID NO: 5110 - RNA, 22 nt, Artificial Sequence
  Description of Artificial Sequence: Synthetic oligonucleotide
uguccaucaaagugucccuuau

SEQ ID NO: 5111 - RNA, 22 nt, Artificial Sequence
  Description of Artificial Sequence: Synthetic oligonucleotide
uaagcauaauuaaaacaaggaa

SEQ ID NO: 5112 - RNA, 22 nt, Artificial Sequence
  Description of Artificial Sequence: Synthetic oligonucleotide
auaagcauaauuaaaacaagga

SEQ ID NO: 5113 - RNA, 22 nt, Artificial Sequence
  Description of Artificial Sequence: Synthetic oligonucleotide
agcauaauuaaaacaaggaaua

SEQ ID NO: 5114 - RNA, 22 nt, Artificial Sequence
  Description of Artificial Sequence: Synthetic oligonucleotide
aagcauaauuaaaacaaggaau

SEQ ID NO: 5115 - RNA, 22 nt, Artificial Sequence
  Description of Artificial Sequence: Synthetic oligonucleotide
gcauaauuaaaacaaggaauag

SEQ ID NO: 5116 - RNA, 22 nt, Artificial Sequence
  Description of Artificial Sequence: Synthetic oligonucleotide
uaauuaaaacaaggaauagcag

SEQ ID NO: 5117 - RNA, 22 nt, Artificial Sequence
  Description of Artificial Sequence: Synthetic oligonucleotide
auaauuaaaacaaggaauagca

SEQ ID NO: 5118 - RNA, 22 nt, Artificial Sequence
  Description of Artificial Sequence: Synthetic oligonucleotide
auuaaaacaaggaauagcagaa

SEQ ID NO: 5119 - RNA, 22 nt, Artificial Sequence
  Description of Artificial Sequence: Synthetic oligonucleotide
aauuaaaacaaggaauagcaga

SEQ ID NO: 5120 - RNA, 22 nt, Artificial Sequence
  Description of Artificial Sequence: Synthetic oligonucleotide
agcauacuccugauuaggaugu

SEQ ID NO: 5121 - RNA, 22 nt, Artificial Sequence
  Description of Artificial Sequence: Synthetic oligonucleotide
cagcauacuccugauuaggaug

SEQ ID NO: 5122 - RNA, 22 nt, Artificial Sequence
  Description of Artificial Sequence: Synthetic oligonucleotide
cuccugauuaggauguuuagua

SEQ ID NO: 5123 - RNA, 22 nt, Artificial Sequence
  Description of Artificial Sequence: Synthetic oligonucleotide
acuccugauuaggauguuuagu

SEQ ID NO: 5124 - RNA, 22 nt, Artificial Sequence
  Description of Artificial Sequence: Synthetic oligonucleotide
ccugauuaggauguuuaguaag

SEQ ID NO: 5125 - RNA, 22 nt, Artificial Sequence
  Description of Artificial Sequence: Synthetic oligonucleotide
uccugauuaggauguuuaguaa

SEQ ID NO: 5126 - RNA, 22 nt, Artificial Sequence
  Description of Artificial Sequence: Synthetic oligonucleotide
cauacuccugauuaggauguuu

SEQ ID NO: 5127 - RNA, 22 nt, Artificial Sequence
  Description of Artificial Sequence: Synthetic oligonucleotide
gcauacuccugauuaggauguu

SEQ ID NO: 5128 - RNA, 22 nt, Artificial Sequence
  Description of Artificial Sequence: Synthetic oligonucleotide
uacuccugauuaggauguuuag

SEQ ID NO: 5129 - RNA, 22 nt, Artificial Sequence
  Description of Artificial Sequence: Synthetic oligonucleotide
auacuccugauuaggauguuua

SEQ ID NO: 5130 - RNA, 22 nt, Artificial Sequence
  Description of Artificial Sequence: Synthetic oligonucleotide
agccaguaauucuaacauagug

SEQ ID NO: 5131 - RNA, 22 nt, Artificial Sequence
  Description of Artificial Sequence: Synthetic oligonucleotide
aagccaguaauucuaacauagu

SEQ ID NO: 5132 - RNA, 22 nt, Artificial Sequence
  Description of Artificial Sequence: Synthetic oligonucleotide
aguaauucuaacauagugcucu

SEQ ID NO: 5133 - RNA, 22 nt, Artificial Sequence
  Description of Artificial Sequence: Synthetic oligonucleotide
caguaauucuaacauagugcuc

SEQ ID NO: 5134 - RNA, 22 nt, Artificial Sequence
  Description of Artificial Sequence: Synthetic oligonucleotide
ccaguaauucuaacauagugcu

SEQ ID NO: 5135 - RNA, 22 nt, Artificial Sequence
  Description of Artificial Sequence: Synthetic oligonucleotide
gccaguaauucuaacauagugc

SEQ ID NO: 5136 - RNA, 22 nt, Artificial Sequence
  Description of Artificial Sequence: Synthetic oligonucleotide
uuuaucagaaccagcaccaaaa

SEQ ID NO: 5137 - RNA, 22 nt, Artificial Sequence
  Description of Artificial Sequence: Synthetic oligonucleotide
cuuuaucagaaccagcaccaaa

SEQ ID NO: 5138 - RNA, 22 nt, Artificial Sequence
  Description of Artificial Sequence: Synthetic oligonucleotide
aucagaaccagcaccaaaaugu

SEQ ID NO: 5139 - RNA, 22 nt, Artificial Sequence
  Description of Artificial Sequence: Synthetic oligonucleotide
uaucagaaccagcaccaaaaug

SEQ ID NO: 5140 - RNA, 22 nt, Artificial Sequence
  Description of Artificial Sequence: Synthetic oligonucleotide
uuaucagaaccagcaccaaaau

SEQ ID NO: 5141 - RNA, 22 nt, Artificial Sequence
  Description of Artificial Sequence: Synthetic oligonucleotide
gaaccagcaccaaaauguauaa

SEQ ID NO: 5142 - RNA, 22 nt, Artificial Sequence
  Description of Artificial Sequence: Synthetic oligonucleotide
agaaccagcaccaaaauguaua

SEQ ID NO: 5143 - RNA, 22 nt, Artificial Sequence
  Description of Artificial Sequence: Synthetic oligonucleotide
cagaaccagcaccaaaauguau

SEQ ID NO: 5144 - RNA, 22 nt, Artificial Sequence
  Description of Artificial Sequence: Synthetic oligonucleotide
acgagaauucauucugcacaag

SEQ ID NO: 5145 - RNA, 22 nt, Artificial Sequence
  Description of Artificial Sequence: Synthetic oligonucleotide
ucugaucccaauauuuaaaaua

SEQ ID NO: 5146 - RNA, 22 nt, Artificial Sequence
  Description of Artificial Sequence: Synthetic oligonucleotide
gucugaucccaauauuuaaaau

SEQ ID NO: 5147 - RNA, 22 nt, Artificial Sequence
  Description of Artificial Sequence: Synthetic oligonucleotide
ugucugaucccaauauuuaaaa

SEQ ID NO: 5148 - RNA, 22 nt, Artificial Sequence
  Description of Artificial Sequence: Synthetic oligonucleotide
augucugaucccaauauuuaaa

SEQ ID NO: 5149 - RNA, 22 nt, Artificial Sequence
  Description of Artificial Sequence: Synthetic oligonucleotide
aucccaauauuuaaaauaacgg

SEQ ID NO: 5150 - RNA, 22 nt, Artificial Sequence
  Description of Artificial Sequence: Synthetic oligonucleotide
gaucccaauauuuaaaauaacg

SEQ ID NO: 5151 - RNA, 22 nt, Artificial Sequence
  Description of Artificial Sequence: Synthetic oligonucleotide
ugaucccaauauuuaaaauaac

SEQ ID NO: 5152 - RNA, 22 nt, Artificial Sequence
  Description of Artificial Sequence: Synthetic oligonucleotide
cugaucccaauauuuaaaauaa

SEQ ID NO: 5153 - RNA, 22 nt, Artificial Sequence
  Description of Artificial Sequence: Synthetic oligonucleotide
uaugucugaucccaauauuuaa

SEQ ID NO: 5154 - RNA, 22 nt, Artificial Sequence
  Description of Artificial Sequence: Synthetic oligonucleotide
guaugucugaucccaauauuua

SEQ ID NO: 5155 - RNA, 22 nt, Artificial Sequence
  Description of Artificial Sequence: Synthetic oligonucleotide
uucuuugcacuaauggcauacu

SEQ ID NO: 5156 - RNA, 22 nt, Artificial Sequence
  Description of Artificial Sequence: Synthetic oligonucleotide
auucuuugcacuaauggcauac

SEQ ID NO: 5157 - RNA, 22 nt, Artificial Sequence
  Description of Artificial Sequence: Synthetic oligonucleotide
uauucuuugcacuaauggcaua

SEQ ID NO: 5158 - RNA, 22 nt, Artificial Sequence
  Description of Artificial Sequence: Synthetic oligonucleotide
cuauucuuugcacuaauggcau

SEQ ID NO: 5159 - RNA, 22 nt, Artificial Sequence
  Description of Artificial Sequence: Synthetic oligonucleotide
uugcacuaauggcauacuuaag

SEQ ID NO: 5160 - RNA, 22 nt, Artificial Sequence
  Description of Artificial Sequence: Synthetic oligonucleotide
uuugcacuaauggcauacuuaa

SEQ ID NO: 5161 - RNA, 22 nt, Artificial Sequence
  Description of Artificial Sequence: Synthetic oligonucleotide
cuuugcacuaauggcauacuua

SEQ ID NO: 5162 - RNA, 22 nt, Artificial Sequence
  Description of Artificial Sequence: Synthetic oligonucleotide
ucuuugcacuaauggcauacuu

SEQ ID NO: 5163 - RNA, 22 nt, Artificial Sequence
  Description of Artificial Sequence: Synthetic oligonucleotide
ucuauucuuugcacuaauggca

SEQ ID NO: 5164 - RNA, 22 nt, Artificial Sequence
  Description of Artificial Sequence: Synthetic oligonucleotide
cucuauucuuugcacuaauggc

SEQ ID NO: 5165 - RNA, 22 nt, Artificial Sequence
  Description of Artificial Sequence: Synthetic oligonucleotide
caguaccaguguguguacacaa

SEQ ID NO: 5166 - RNA, 22 nt, Artificial Sequence
  Description of Artificial Sequence: Synthetic oligonucleotide
ccaguaccaguguguguacaca

SEQ ID NO: 5167 - RNA, 22 nt, Artificial Sequence
  Description of Artificial Sequence: Synthetic oligonucleotide
guaccaguguguguacacaaca

SEQ ID NO: 5168 - RNA, 22 nt, Artificial Sequence
  Description of Artificial Sequence: Synthetic oligonucleotide
aguaccaguguguguacacaac

SEQ ID NO: 5169 - RNA, 22 nt, Artificial Sequence
  Description of Artificial Sequence: Synthetic oligonucleotide
uuagaugaaccuguuugcgcau

SEQ ID NO: 5170 - RNA, 22 nt, Artificial Sequence
  Description of Artificial Sequence: Synthetic oligonucleotide
ugugauguugauaugacauggu

SEQ ID NO: 5171 - RNA, 22 nt, Artificial Sequence
  Description of Artificial Sequence: Synthetic oligonucleotide
uuucuggauugaaugaccacau

SEQ ID NO: 5172 - RNA, 22 nt, Artificial Sequence
  Description of Artificial Sequence: Synthetic oligonucleotide
guuucuggauugaaugaccaca

SEQ ID NO: 5173 - RNA, 22 nt, Artificial Sequence
  Description of Artificial Sequence: Synthetic oligonucleotide
gugauguugauaugacaugguc

SEQ ID NO: 5174 - RNA, 22 nt, Artificial Sequence
  Description of Artificial Sequence: Synthetic oligonucleotide
gugaaaaugugguggcucuuuc

SEQ ID NO: 5175 - RNA, 22 nt, Artificial Sequence
  Description of Artificial Sequence: Synthetic oligonucleotide
ggugaaaaugugguggcucuuu

SEQ ID NO: 5176 - RNA, 22 nt, Artificial Sequence
  Description of Artificial Sequence: Synthetic oligonucleotide
gaaaaugugguggcucuuucaa

SEQ ID NO: 5177 - RNA, 22 nt, Artificial Sequence
  Description of Artificial Sequence: Synthetic oligonucleotide
ugaaaaugugguggcucuuuca

SEQ ID NO: 5178 - RNA, 22 nt, Artificial Sequence
  Description of Artificial Sequence: Synthetic oligonucleotide
cucggugaaaaugugguggcuc

SEQ ID NO: 5179 - RNA, 22 nt, Artificial Sequence
  Description of Artificial Sequence: Synthetic oligonucleotide
ccucggugaaaaugugguggcu

SEQ ID NO: 5180 - RNA, 22 nt, Artificial Sequence
  Description of Artificial Sequence: Synthetic oligonucleotide
cggugaaaaugugguggcucuu

SEQ ID NO: 5181 - RNA, 22 nt, Artificial Sequence
  Description of Artificial Sequence: Synthetic oligonucleotide
ucggugaaaaugugguggcucu

SEQ ID NO: 5182 - RNA, 22 nt, Artificial Sequence
  Description of Artificial Sequence: Synthetic oligonucleotide
gccucggugaaaaugugguggc

SEQ ID NO: 5183 - RNA, 22 nt, Artificial Sequence
  Description of Artificial Sequence: Synthetic oligonucleotide
ggccucggugaaaauguggugg

SEQ ID NO: 5184 - RNA, 22 nt, Artificial Sequence
  Description of Artificial Sequence: Synthetic oligonucleotide
caggagaaguuccccuacugcu

SEQ ID NO: 5185 - RNA, 22 nt, Artificial Sequence
  Description of Artificial Sequence: Synthetic oligonucleotide
gcaggagaaguuccccuacugc

SEQ ID NO: 5186 - RNA, 22 nt, Artificial Sequence
  Description of Artificial Sequence: Synthetic oligonucleotide
gagaaguuccccuacugcugcc

SEQ ID NO: 5187 - RNA, 22 nt, Artificial Sequence
  Description of Artificial Sequence: Synthetic oligonucleotide
ggagaaguuccccuacugcugc

SEQ ID NO: 5188 - RNA, 22 nt, Artificial Sequence
  Description of Artificial Sequence: Synthetic oligonucleotide
aggagaaguuccccuacugcug

SEQ ID NO: 5189 - RNA, 22 nt, Artificial Sequence
  Description of Artificial Sequence: Synthetic oligonucleotide
auugucuaacaacaucaaaagg

SEQ ID NO: 5190 - RNA, 22 nt, Artificial Sequence
  Description of Artificial Sequence: Synthetic oligonucleotide
cauugucuaacaacaucaaaag

SEQ ID NO: 5191 - RNA, 22 nt, Artificial Sequence
  Description of Artificial Sequence: Synthetic oligonucleotide
aagaagauguacauucuaacca

SEQ ID NO: 5192 - RNA, 22 nt, Artificial Sequence
  Description of Artificial Sequence: Synthetic oligonucleotide
agcauugucuaacaacaucaaa

SEQ ID NO: 5193 - RNA, 22 nt, Artificial Sequence
  Description of Artificial Sequence: Synthetic oligonucleotide
ucuaacaacaucaaaaggugua

SEQ ID NO: 5194 - RNA, 22 nt, Artificial Sequence
  Description of Artificial Sequence: Synthetic oligonucleotide
gucuaacaacaucaaaaggugu

SEQ ID NO: 5195 - RNA, 22 nt, Artificial Sequence
  Description of Artificial Sequence: Synthetic oligonucleotide
ugucuaacaacaucaaaaggug

SEQ ID NO: 5196 - RNA, 22 nt, Artificial Sequence
  Description of Artificial Sequence: Synthetic oligonucleotide
uugucuaacaacaucaaaaggu

SEQ ID NO: 5197 - RNA, 22 nt, Artificial Sequence
  Description of Artificial Sequence: Synthetic oligonucleotide
gagcauugucuaacaacaucaa

SEQ ID NO: 5198 - RNA, 22 nt, Artificial Sequence
  Description of Artificial Sequence: Synthetic oligonucleotide
ugagcauugucuaacaacauca

SEQ ID NO: 5199 - RNA, 22 nt, Artificial Sequence
  Description of Artificial Sequence: Synthetic oligonucleotide
acauuacaagagugagcuguuu

SEQ ID NO: 5200 - RNA, 22 nt, Artificial Sequence
  Description of Artificial Sequence: Synthetic oligonucleotide
auuacaagagugagcuguuuca

SEQ ID NO: 5201 - RNA, 22 nt, Artificial Sequence
  Description of Artificial Sequence: Synthetic oligonucleotide
ccuuagacacagcaaagucaua

SEQ ID NO: 5202 - RNA, 22 nt, Artificial Sequence
  Description of Artificial Sequence: Synthetic oligonucleotide
aacccuuagacacagcaaaguc

SEQ ID NO: 5203 - RNA, 22 nt, Artificial Sequence
  Description of Artificial Sequence: Synthetic oligonucleotide
cgcacgguguaagacgggcugc

SEQ ID NO: 5204 - RNA, 22 nt, Artificial Sequence
  Description of Artificial Sequence: Synthetic oligonucleotide
gcacgguguaagacgggcugca

SEQ ID NO: 5205 - RNA, 22 nt, Artificial Sequence
  Description of Artificial Sequence: Synthetic oligonucleotide
cacgguguaagacgggcugcac

SEQ ID NO: 5206 - RNA, 22 nt, Artificial Sequence
  Description of Artificial Sequence: Synthetic oligonucleotide
acgguguaagacgggcugcacu

SEQ ID NO: 5207 - RNA, 22 nt, Artificial Sequence
  Description of Artificial Sequence: Synthetic oligonucleotide
cgguguaagacgggcugcacuu

SEQ ID NO: 5208 - RNA, 22 nt, Artificial Sequence
  Description of Artificial Sequence: Synthetic oligonucleotide
gguguaagacgggcugcacuua

SEQ ID NO: 5209 - RNA, 22 nt, Artificial Sequence
  Description of Artificial Sequence: Synthetic oligonucleotide
guguaagacgggcugcacuuac

SEQ ID NO: 5210 - RNA, 22 nt, Artificial Sequence
  Description of Artificial Sequence: Synthetic oligonucleotide
uguaagacgggcugcacuuaca

SEQ ID NO: 5211 - RNA, 22 nt, Artificial Sequence
  Description of Artificial Sequence: Synthetic oligonucleotide
guaagacgggcugcacuuacac

SEQ ID NO: 5212 - RNA, 22 nt, Artificial Sequence
  Description of Artificial Sequence: Synthetic oligonucleotide
uaagacgggcugcacuuacacc

SEQ ID NO: 5213 - RNA, 22 nt, Artificial Sequence
  Description of Artificial Sequence: Synthetic oligonucleotide
ugauuaucuaaugucaguacac

SEQ ID NO: 5214 - RNA, 22 nt, Artificial Sequence
  Description of Artificial Sequence: Synthetic oligonucleotide
ucuugauuaucuaaugucagua

SEQ ID NO: 5215 - RNA, 22 nt, Artificial Sequence
  Description of Artificial Sequence: Synthetic oligonucleotide
cuugauuaucuaaugucaguac

SEQ ID NO: 5216 - RNA, 22 nt, Artificial Sequence
  Description of Artificial Sequence: Synthetic oligonucleotide
gauuaucuaaugucaguacacc

SEQ ID NO: 5217 - RNA, 22 nt, Artificial Sequence
  Description of Artificial Sequence: Synthetic oligonucleotide
gaucuugauuaucuaaugucag

SEQ ID NO: 5218 - RNA, 22 nt, Artificial Sequence
  Description of Artificial Sequence: Synthetic oligonucleotide
aucuugauuaucuaaugucagu

SEQ ID NO: 5219 - RNA, 22 nt, Artificial Sequence
  Description of Artificial Sequence: Synthetic oligonucleotide
ucuguugucacuuacuguacaa

SEQ ID NO: 5220 - RNA, 22 nt, Artificial Sequence
  Description of Artificial Sequence: Synthetic oligonucleotide
cuguugucacuuacuguacaag

SEQ ID NO: 5221 - RNA, 22 nt, Artificial Sequence
  Description of Artificial Sequence: Synthetic oligonucleotide
caucuguugucacuuacuguac

SEQ ID NO: 5222 - RNA, 22 nt, Artificial Sequence
  Description of Artificial Sequence: Synthetic oligonucleotide
aucuguugucacuuacuguaca

SEQ ID NO: 5223 - RNA, 22 nt, Artificial Sequence
  Description of Artificial Sequence: Synthetic oligonucleotide
uugucacuuacuguacaagcaa

SEQ ID NO: 5224 - RNA, 22 nt, Artificial Sequence
  Description of Artificial Sequence: Synthetic oligonucleotide
ugucacuuacuguacaagcaaa

SEQ ID NO: 5225 - RNA, 22 nt, Artificial Sequence
  Description of Artificial Sequence: Synthetic oligonucleotide
uguugucacuuacuguacaagc

SEQ ID NO: 5226 - RNA, 22 nt, Artificial Sequence
  Description of Artificial Sequence: Synthetic oligonucleotide
guugucacuuacuguacaagca

SEQ ID NO: 5227 - RNA, 22 nt, Artificial Sequence
  Description of Artificial Sequence: Synthetic oligonucleotide
aacaucuguugucacuuacugu

SEQ ID NO: 5228 - RNA, 22 nt, Artificial Sequence
  Description of Artificial Sequence: Synthetic oligonucleotide
acaucuguugucacuuacugua

SEQ ID NO: 5229 - RNA, 22 nt, Artificial Sequence
  Description of Artificial Sequence: Synthetic oligonucleotide
ugggguccauuaucagacauuu

SEQ ID NO: 5230 - RNA, 22 nt, Artificial Sequence
  Description of Artificial Sequence: Synthetic oligonucleotide
aaucaucugguaauuuauaauu

SEQ ID NO: 5231 - RNA, 22 nt, Artificial Sequence
  Description of Artificial Sequence: Synthetic oligonucleotide
aucaucugguaauuuauaauua

SEQ ID NO: 5232 - RNA, 22 nt, Artificial Sequence
  Description of Artificial Sequence: Synthetic oligonucleotide
ccaaaacuuguaggugggaaca

SEQ ID NO: 5233 - RNA, 22 nt, Artificial Sequence
  Description of Artificial Sequence: Synthetic oligonucleotide
ucagcauuccaagaauguucug

SEQ ID NO: 5234 - RNA, 22 nt, Artificial Sequence
  Description of Artificial Sequence: Synthetic oligonucleotide
cagcauuccaagaauguucugu

SEQ ID NO: 5235 - RNA, 22 nt, Artificial Sequence
  Description of Artificial Sequence: Synthetic oligonucleotide
aguuuacauccugauuauguac

SEQ ID NO: 5236 - RNA, 22 nt, Artificial Sequence
  Description of Artificial Sequence: Synthetic oligonucleotide
cauuccaagaauguucuguuau

SEQ ID NO: 5237 - RNA, 22 nt, Artificial Sequence
  Description of Artificial Sequence: Synthetic oligonucleotide
uuacauccugauuauguacaac

SEQ ID NO: 5238 - RNA, 22 nt, Artificial Sequence
  Description of Artificial Sequence: Synthetic oligonucleotide
uuuacauccugauuauguacaa

SEQ ID NO: 5239 - RNA, 22 nt, Artificial Sequence
  Description of Artificial Sequence: Synthetic oligonucleotide
guuuacauccugauuauguaca

SEQ ID NO: 5240 - RNA, 22 nt, Artificial Sequence
  Description of Artificial Sequence: Synthetic oligonucleotide
gaagccucagcagcagauuucu

SEQ ID NO: 5241 - RNA, 22 nt, Artificial Sequence
  Description of Artificial Sequence: Synthetic oligonucleotide
aagccucagcagcagauuucuu

SEQ ID NO: 5242 - RNA, 22 nt, Artificial Sequence
  Description of Artificial Sequence: Synthetic oligonucleotide
uagaagccucagcagcagauuu

SEQ ID NO: 5243 - RNA, 22 nt, Artificial Sequence
  Description of Artificial Sequence: Synthetic oligonucleotide
agaagccucagcagcagauuuc

SEQ ID NO: 5244 - RNA, 22 nt, Artificial Sequence
  Description of Artificial Sequence: Synthetic oligonucleotide
uuagaagccucagcagcagauu

SEQ ID NO: 5245 - RNA, 22 nt, Artificial Sequence
  Description of Artificial Sequence: Synthetic oligonucleotide
gcuccacuaaaauacuuguacu

SEQ ID NO: 5246 - RNA, 22 nt, Artificial Sequence
  Description of Artificial Sequence: Synthetic oligonucleotide
cuccacuaaaauacuuguacuu

SEQ ID NO: 5247 - RNA, 22 nt, Artificial Sequence
  Description of Artificial Sequence: Synthetic oligonucleotide
aaauguuaaaaacacuauuagc

SEQ ID NO: 5248 - RNA, 22 nt, Artificial Sequence
  Description of Artificial Sequence: Synthetic oligonucleotide
aauguuaaaaacacuauuagca

SEQ ID NO: 5249 - RNA, 22 nt, Artificial Sequence
  Description of Artificial Sequence: Synthetic oligonucleotide
auguuaaaaacacuauuagcau

SEQ ID NO: 5250 - RNA, 22 nt, Artificial Sequence
  Description of Artificial Sequence: Synthetic oligonucleotide
uguuaaaaacacuauuagcaua

SEQ ID NO: 5251 - RNA, 22 nt, Artificial Sequence
  Description of Artificial Sequence: Synthetic oligonucleotide
guuaaaaacacuauuagcauaa

SEQ ID NO: 5252 - RNA, 22 nt, Artificial Sequence
  Description of Artificial Sequence: Synthetic oligonucleotide
uuaaaaacacuauuagcauaag

SEQ ID NO: 5253 - RNA, 22 nt, Artificial Sequence
  Description of Artificial Sequence: Synthetic oligonucleotide
uaaaaacacuauuagcauaagc

SEQ ID NO: 5254 - RNA, 22 nt, Artificial Sequence
  Description of Artificial Sequence: Synthetic oligonucleotide
aaaaacacuauuagcauaagca

SEQ ID NO: 5255 - RNA, 22 nt, Artificial Sequence
  Description of Artificial Sequence: Synthetic oligonucleotide
acaaauguuaaaaacacuauua

SEQ ID NO: 5256 - RNA, 22 nt, Artificial Sequence
  Description of Artificial Sequence: Synthetic oligonucleotide
caaauguuaaaaacacuauuag

SEQ ID NO: 5257 - RNA, 22 nt, Artificial Sequence
  Description of Artificial Sequence: Synthetic oligonucleotide
cauuuauuaaauggaaaaccag

SEQ ID NO: 5258 - RNA, 22 nt, Artificial Sequence
  Description of Artificial Sequence: Synthetic oligonucleotide
ccauuuauuaaauggaaaacca

SEQ ID NO: 5259 - RNA, 22 nt, Artificial Sequence
  Description of Artificial Sequence: Synthetic oligonucleotide
cccauuuauuaaauggaaaacc

SEQ ID NO: 5260 - RNA, 22 nt, Artificial Sequence
  Description of Artificial Sequence: Synthetic oligonucleotide
ccccauuuauuaaauggaaaac

SEQ ID NO: 5261 - RNA, 22 nt, Artificial Sequence
  Description of Artificial Sequence: Synthetic oligonucleotide
uauuaaauggaaaaccagcuga

SEQ ID NO: 5262 - RNA, 22 nt, Artificial Sequence
  Description of Artificial Sequence: Synthetic oligonucleotide
uuauuaaauggaaaaccagcug

SEQ ID NO: 5263 - RNA, 22 nt, Artificial Sequence
  Description of Artificial Sequence: Synthetic oligonucleotide
uuuauuaaauggaaaaccagcu

SEQ ID NO: 5264 - RNA, 22 nt, Artificial Sequence
  Description of Artificial Sequence: Synthetic oligonucleotide
auuuauuaaauggaaaaccagc

SEQ ID NO: 5265 - RNA, 22 nt, Artificial Sequence
  Description of Artificial Sequence: Synthetic oligonucleotide
accccauuuauuaaauggaaaa

SEQ ID NO: 5266 - RNA, 22 nt, Artificial Sequence
  Description of Artificial Sequence: Synthetic oligonucleotide
uccacauaccgcagacgguaca

SEQ ID NO: 5267 - RNA, 22 nt, Artificial Sequence
  Description of Artificial Sequence: Synthetic oligonucleotide
ccacauaccgcagacgguacag

SEQ ID NO: 5268 - RNA, 22 nt, Artificial Sequence
  Description of Artificial Sequence: Synthetic oligonucleotide
auaccgcagacgguacagacug

SEQ ID NO: 5269 - RNA, 22 nt, Artificial Sequence
  Description of Artificial Sequence: Synthetic oligonucleotide
uuuccacauaccgcagacggua

SEQ ID NO: 5270 - RNA, 22 nt, Artificial Sequence
  Description of Artificial Sequence: Synthetic oligonucleotide
cuuuccacauaccgcagacggu

SEQ ID NO: 5271 - RNA, 22 nt, Artificial Sequence
  Description of Artificial Sequence: Synthetic oligonucleotide
uaggcagcucucccuagcauug

SEQ ID NO: 5272 - RNA, 22 nt, Artificial Sequence
  Description of Artificial Sequence: Synthetic oligonucleotide
aggcagcucucccuagcauugu

SEQ ID NO: 5273 - RNA, 22 nt, Artificial Sequence
  Description of Artificial Sequence: Synthetic oligonucleotide
ucucccuagcauuguucacugu

SEQ ID NO: 5274 - RNA, 22 nt, Artificial Sequence
  Description of Artificial Sequence: Synthetic oligonucleotide
cucccuagcauuguucacugua

SEQ ID NO: 5275 - RNA, 22 nt, Artificial Sequence
  Description of Artificial Sequence: Synthetic oligonucleotide
gcucucccuagcauuguucacu

SEQ ID NO: 5276 - RNA, 22 nt, Artificial Sequence
  Description of Artificial Sequence: Synthetic oligonucleotide
cucucccuagcauuguucacug

SEQ ID NO: 5277 - RNA, 22 nt, Artificial Sequence
  Description of Artificial Sequence: Synthetic oligonucleotide
cagcucucccuagcauuguuca

SEQ ID NO: 5278 - RNA, 22 nt, Artificial Sequence
  Description of Artificial Sequence: Synthetic oligonucleotide
agcucucccuagcauuguucac

SEQ ID NO: 5279 - RNA, 22 nt, Artificial Sequence
  Description of Artificial Sequence: Synthetic oligonucleotide
ggcagcucucccuagcauuguu

SEQ ID NO: 5280 - RNA, 22 nt, Artificial Sequence
  Description of Artificial Sequence: Synthetic oligonucleotide
gcagcucucccuagcauuguuc

SEQ ID NO: 5281 - RNA, 22 nt, Artificial Sequence
  Description of Artificial Sequence: Synthetic oligonucleotide
uuacuagguuccauuguucaag

SEQ ID NO: 5282 - RNA, 22 nt, Artificial Sequence
  Description of Artificial Sequence: Synthetic oligonucleotide
uacuagguuccauuguucaagg

SEQ ID NO: 5283 - RNA, 22 nt, Artificial Sequence
  Description of Artificial Sequence: Synthetic oligonucleotide
acuagguuccauuguucaagga

SEQ ID NO: 5284 - RNA, 22 nt, Artificial Sequence
  Description of Artificial Sequence: Synthetic oligonucleotide
cuagguuccauuguucaaggag

SEQ ID NO: 5285 - RNA, 22 nt, Artificial Sequence
  Description of Artificial Sequence: Synthetic oligonucleotide
uauuacuagguuccauuguuca

SEQ ID NO: 5286 - RNA, 22 nt, Artificial Sequence
  Description of Artificial Sequence: Synthetic oligonucleotide
auuacuagguuccauuguucaa

SEQ ID NO: 5287 - RNA, 22 nt, Artificial Sequence
  Description of Artificial Sequence: Synthetic oligonucleotide
gacucuuaccaguaccaggugg

SEQ ID NO: 5288 - RNA, 22 nt, Artificial Sequence
  Description of Artificial Sequence: Synthetic oligonucleotide
ugacucuuaccaguaccaggug

SEQ ID NO: 5289 - RNA, 22 nt, Artificial Sequence
  Description of Artificial Sequence: Synthetic oligonucleotide
caaaaugacucuuaccaguacc

SEQ ID NO: 5290 - RNA, 22 nt, Artificial Sequence
  Description of Artificial Sequence: Synthetic oligonucleotide
uuguuaccacucuaacagaacc

SEQ ID NO: 5291 - RNA, 22 nt, Artificial Sequence
  Description of Artificial Sequence: Synthetic oligonucleotide
gcaaaaugacucuuaccaguac

SEQ ID NO: 5292 - RNA, 22 nt, Artificial Sequence
  Description of Artificial Sequence: Synthetic oligonucleotide
ccguucaaucauaaguguacca

SEQ ID NO: 5293 - RNA, 22 nt, Artificial Sequence
  Description of Artificial Sequence: Synthetic oligonucleotide
cuaacaacaucaaaagguguaa

SEQ ID NO: 5294 - RNA, 22 nt, Artificial Sequence
  Description of Artificial Sequence: Synthetic oligonucleotide
gcauuccaagaauguucuguua

SEQ ID NO: 5295 - RNA, 22 nt, Artificial Sequence
  Description of Artificial Sequence: Synthetic oligonucleotide
ucuucgguaguagccaauuugg

SEQ ID NO: 5296 - RNA, 22 nt, Artificial Sequence
  Description of Artificial Sequence: Synthetic oligonucleotide
cuucgguaguagccaauuuggu

SEQ ID NO: 5297 - RNA, 22 nt, Artificial Sequence
  Description of Artificial Sequence: Synthetic oligonucleotide
uucgguaguagccaauuugguc

SEQ ID NO: 5298 - RNA, 22 nt, Artificial Sequence
  Description of Artificial Sequence: Synthetic oligonucleotide
ucgguaguagccaauuugguca

SEQ ID NO: 5299 - RNA, 22 nt, Artificial Sequence
  Description of Artificial Sequence: Synthetic oligonucleotide
cgguaguagccaauuuggucau

SEQ ID NO: 5300 - RNA, 22 nt, Artificial Sequence
  Description of Artificial Sequence: Synthetic oligonucleotide
gguaguagccaauuuggucauc

SEQ ID NO: 5301 - RNA, 22 nt, Artificial Sequence
  Description of Artificial Sequence: Synthetic oligonucleotide
guaguagccaauuuggucaucu

SEQ ID NO: 5302 - RNA, 22 nt, Artificial Sequence
  Description of Artificial Sequence: Synthetic oligonucleotide
uaguagccaauuuggucaucug

SEQ ID NO: 5303 - RNA, 22 nt, Artificial Sequence
  Description of Artificial Sequence: Synthetic oligonucleotide
gcucuucgguaguagccaauuu

SEQ ID NO: 5304 - RNA, 22 nt, Artificial Sequence
  Description of Artificial Sequence: Synthetic oligonucleotide
cucuucgguaguagccaauuug

SEQ ID NO: 5305 - RNA, 22 nt, Artificial Sequence
  Description of Artificial Sequence: Synthetic oligonucleotide
auuccaagaauguucuguuauc

SEQ ID NO: 5306 - RNA, 22 nt, Artificial Sequence
  Description of Artificial Sequence: Synthetic oligonucleotide
caucaagccuacaagacaagcc

SEQ ID NO: 5307 - RNA, 22 nt, Artificial Sequence
  Description of Artificial Sequence: Synthetic oligonucleotide
acaucaagccuacaagacaagc

SEQ ID NO: 5308 - RNA, 22 nt, Artificial Sequence
  Description of Artificial Sequence: Synthetic oligonucleotide
agccuacaagacaagccauugc

SEQ ID NO: 5309 - RNA, 22 nt, Artificial Sequence
  Description of Artificial Sequence: Synthetic oligonucleotide
aagccuacaagacaagccauug

SEQ ID NO: 5310 - RNA, 22 nt, Artificial Sequence
  Description of Artificial Sequence: Synthetic oligonucleotide
caagccuacaagacaagccauu

SEQ ID NO: 5311 - RNA, 22 nt, Artificial Sequence
  Description of Artificial Sequence: Synthetic oligonucleotide
ucaagccuacaagacaagccau

SEQ ID NO: 5312 - RNA, 22 nt, Artificial Sequence
  Description of Artificial Sequence: Synthetic oligonucleotide
aucaagccuacaagacaagcca

SEQ ID NO: 5313 - RNA, 22 nt, Artificial Sequence
  Description of Artificial Sequence: Synthetic oligonucleotide
caacacugagguguguaggugc

SEQ ID NO: 5314 - RNA, 22 nt, Artificial Sequence
  Description of Artificial Sequence: Synthetic oligonucleotide
acacugagguguguaggugccu

SEQ ID NO: 5315 - RNA, 22 nt, Artificial Sequence
  Description of Artificial Sequence: Synthetic oligonucleotide
aacacugagguguguaggugcc

SEQ ID NO: 5316 - RNA, 22 nt, Artificial Sequence
  Description of Artificial Sequence: Synthetic oligonucleotide
acugagguguguaggugccugu

SEQ ID NO: 5317 - RNA, 22 nt, Artificial Sequence
  Description of Artificial Sequence: Synthetic oligonucleotide
cacugagguguguaggugccug

SEQ ID NO: 5318 - RNA, 22 nt, Artificial Sequence
  Description of Artificial Sequence: Synthetic oligonucleotide
ugagguguguaggugccugugu

SEQ ID NO: 5319 - RNA, 22 nt, Artificial Sequence
  Description of Artificial Sequence: Synthetic oligonucleotide
cugagguguguaggugccugug

SEQ ID NO: 5320 - RNA, 22 nt, Artificial Sequence
  Description of Artificial Sequence: Synthetic oligonucleotide
agguguguaggugccuguguag

SEQ ID NO: 5321 - RNA, 22 nt, Artificial Sequence
  Description of Artificial Sequence: Synthetic oligonucleotide
gagguguguaggugccugugua

SEQ ID NO: 5322 - RNA, 22 nt, Artificial Sequence
  Description of Artificial Sequence: Synthetic oligonucleotide
uguaguuacgagaauucauucu

SEQ ID NO: 5323 - RNA, 22 nt, Artificial Sequence
  Description of Artificial Sequence: Synthetic oligonucleotide
uacgagaauucauucugcacaa

SEQ ID NO: 5324 - RNA, 22 nt, Artificial Sequence
  Description of Artificial Sequence: Synthetic oligonucleotide
uuacgagaauucauucugcaca

SEQ ID NO: 5325 - RNA, 22 nt, Artificial Sequence
  Description of Artificial Sequence: Synthetic oligonucleotide
cgagaauucauucugcacaaga

SEQ ID NO: 5326 - RNA, 22 nt, Artificial Sequence
  Description of Artificial Sequence: Synthetic oligonucleotide
uaguuacgagaauucauucugc

SEQ ID NO: 5327 - RNA, 22 nt, Artificial Sequence
  Description of Artificial Sequence: Synthetic oligonucleotide
guaguuacgagaauucauucug

SEQ ID NO: 5328 - RNA, 22 nt, Artificial Sequence
  Description of Artificial Sequence: Synthetic oligonucleotide
guuacgagaauucauucugcac

SEQ ID NO: 5329 - RNA, 22 nt, Artificial Sequence
  Description of Artificial Sequence: Synthetic oligonucleotide
aguuacgagaauucauucugca

SEQ ID NO: 5330 - RNA, 22 nt, Artificial Sequence
  Description of Artificial Sequence: Synthetic oligonucleotide
caaauguguugucuguaguaau

SEQ ID NO: 5331 - RNA, 22 nt, Artificial Sequence
  Description of Artificial Sequence: Synthetic oligonucleotide
acaaauguguugucuguaguaa

SEQ ID NO: 5332 - RNA, 22 nt, Artificial Sequence
  Description of Artificial Sequence: Synthetic oligonucleotide
uugcucucaagcugguucaauc

SEQ ID NO: 5333 - RNA, 22 nt, Artificial Sequence
  Description of Artificial Sequence: Synthetic oligonucleotide
uuugcucucaagcugguucaau

SEQ ID NO: 5334 - RNA, 22 nt, Artificial Sequence
  Description of Artificial Sequence: Synthetic oligonucleotide
ucucaagcugguucaaucuguc

SEQ ID NO: 5335 - RNA, 22 nt, Artificial Sequence
  Description of Artificial Sequence: Synthetic oligonucleotide
cucucaagcugguucaaucugu

SEQ ID NO: 5336 - RNA, 22 nt, Artificial Sequence
  Description of Artificial Sequence: Synthetic oligonucleotide
gcucucaagcugguucaaucug

SEQ ID NO: 5337 - RNA, 22 nt, Artificial Sequence
  Description of Artificial Sequence: Synthetic oligonucleotide
ugcucucaagcugguucaaucu

SEQ ID NO: 5338 - RNA, 22 nt, Artificial Sequence
  Description of Artificial Sequence: Synthetic oligonucleotide
uguuguuggccuuuaccagaca

SEQ ID NO: 5339 - RNA, 22 nt, Artificial Sequence
  Description of Artificial Sequence: Synthetic oligonucleotide
ucguaacaaucaaaguacuuau

SEQ ID NO: 5340 - RNA, 22 nt, Artificial Sequence
  Description of Artificial Sequence: Synthetic oligonucleotide
cguaacaaucaaaguacuuauc

SEQ ID NO: 5341 - RNA, 22 nt, Artificial Sequence
  Description of Artificial Sequence: Synthetic oligonucleotide
guaacaaucaaaguacuuauca

SEQ ID NO: 5342 - RNA, 22 nt, Artificial Sequence
  Description of Artificial Sequence: Synthetic oligonucleotide
uaacaaucaaaguacuuaucaa

SEQ ID NO: 5343 - RNA, 22 nt, Artificial Sequence
  Description of Artificial Sequence: Synthetic oligonucleotide
aacaaucaaaguacuuaucaac

SEQ ID NO: 5344 - RNA, 22 nt, Artificial Sequence
  Description of Artificial Sequence: Synthetic oligonucleotide
acaaucaaaguacuuaucaaca

SEQ ID NO: 5345 - RNA, 22 nt, Artificial Sequence
  Description of Artificial Sequence: Synthetic oligonucleotide
caaucaaaguacuuaucaacaa

SEQ ID NO: 5346 - RNA, 22 nt, Artificial Sequence
  Description of Artificial Sequence: Synthetic oligonucleotide
aaucaaaguacuuaucaacaac

SEQ ID NO: 5347 - RNA, 22 nt, Artificial Sequence
  Description of Artificial Sequence: Synthetic oligonucleotide
aucaaaguacuuaucaacaacu

SEQ ID NO: 5348 - RNA, 22 nt, Artificial Sequence
  Description of Artificial Sequence: Synthetic oligonucleotide
ucaaaguacuuaucaacaacuu

SEQ ID NO: 5349 - RNA, 22 nt, Artificial Sequence
  Description of Artificial Sequence: Synthetic oligonucleotide
uuagacacagcaaagucauaga

SEQ ID NO: 5350 - RNA, 22 nt, Artificial Sequence
  Description of Artificial Sequence: Synthetic oligonucleotide
cccuuagacacagcaaagucau

SEQ ID NO: 5351 - RNA, 22 nt, Artificial Sequence
  Description of Artificial Sequence: Synthetic oligonucleotide
gacacagcaaagucauagaagu

SEQ ID NO: 5352 - RNA, 22 nt, Artificial Sequence
  Description of Artificial Sequence: Synthetic oligonucleotide
acacagcaaagucauagaaguc

SEQ ID NO: 5353 - RNA, 22 nt, Artificial Sequence
  Description of Artificial Sequence: Synthetic oligonucleotide
uagacacagcaaagucauagaa

SEQ ID NO: 5354 - RNA, 22 nt, Artificial Sequence
  Description of Artificial Sequence: Synthetic oligonucleotide
agacacagcaaagucauagaag

SEQ ID NO: 5355 - RNA, 22 nt, Artificial Sequence
  Description of Artificial Sequence: Synthetic oligonucleotide
acccuuagacacagcaaaguca

SEQ ID NO: 5356 - RNA, 22 nt, Artificial Sequence
  Description of Artificial Sequence: Synthetic oligonucleotide
agcauuccaagaauguucuguu

SEQ ID NO: 5357 - RNA, 22 nt, Artificial Sequence
  Description of Artificial Sequence: Synthetic oligonucleotide
uuggaagcgcucugaaaaacag

SEQ ID NO: 5358 - RNA, 22 nt, Artificial Sequence
  Description of Artificial Sequence: Synthetic oligonucleotide
uuuggaagcgcucugaaaaaca

SEQ ID NO: 5359 - RNA, 22 nt, Artificial Sequence
  Description of Artificial Sequence: Synthetic oligonucleotide
ggaagcgcucugaaaaacagca

SEQ ID NO: 5360 - RNA, 22 nt, Artificial Sequence
  Description of Artificial Sequence: Synthetic oligonucleotide
uggaagcgcucugaaaaacagc

SEQ ID NO: 5361 - RNA, 22 nt, Artificial Sequence
  Description of Artificial Sequence: Synthetic oligonucleotide
cacacugaauugaaauauucug

SEQ ID NO: 5362 - RNA, 22 nt, Artificial Sequence
  Description of Artificial Sequence: Synthetic oligonucleotide
gacuccuguuguacuagauauu

SEQ ID NO: 5363 - RNA, 22 nt, Artificial Sequence
  Description of Artificial Sequence: Synthetic oligonucleotide
cauaaaccaaagcacucacagu

SEQ ID NO: 5364 - RNA, 22 nt, Artificial Sequence
  Description of Artificial Sequence: Synthetic oligonucleotide
cggaguugaucacaacuacagc

SEQ ID NO: 5365 - RNA, 22 nt, Artificial Sequence
  Description of Artificial Sequence: Synthetic oligonucleotide
ggaguugaucacaacuacagcc

SEQ ID NO: 5366 - RNA, 22 nt, Artificial Sequence
  Description of Artificial Sequence: Synthetic oligonucleotide
gaguugaucacaacuacagcca

SEQ ID NO: 5367 - RNA, 22 nt, Artificial Sequence
  Description of Artificial Sequence: Synthetic oligonucleotide
aguugaucacaacuacagccau

SEQ ID NO: 5368 - RNA, 22 nt, Artificial Sequence
  Description of Artificial Sequence: Synthetic oligonucleotide
guugaucacaacuacagccaua

SEQ ID NO: 5369 - RNA, 22 nt, Artificial Sequence
  Description of Artificial Sequence: Synthetic oligonucleotide
uugaucacaacuacagccauaa

SEQ ID NO: 5370 - RNA, 22 nt, Artificial Sequence
  Description of Artificial Sequence: Synthetic oligonucleotide
ugaucacaacuacagccauaac

SEQ ID NO: 5371 - RNA, 22 nt, Artificial Sequence
  Description of Artificial Sequence: Synthetic oligonucleotide
gaucacaacuacagccauaacc

SEQ ID NO: 5372 - RNA, 22 nt, Artificial Sequence
  Description of Artificial Sequence: Synthetic oligonucleotide
cgcggaguugaucacaacuaca

SEQ ID NO: 5373 - RNA, 22 nt, Artificial Sequence
  Description of Artificial Sequence: Synthetic oligonucleotide
gcggaguugaucacaacuacag

SEQ ID NO: 5374 - RNA, 22 nt, Artificial Sequence
  Description of Artificial Sequence: Synthetic oligonucleotide
aaggucagucucaguccaacau

SEQ ID NO: 5375 - RNA, 22 nt, Artificial Sequence
  Description of Artificial Sequence: Synthetic oligonucleotide
uuugauaauaaagaacugacuu

SEQ ID NO: 5376 - RNA, 22 nt, Artificial Sequence
  Description of Artificial Sequence: Synthetic oligonucleotide
cuucagacauaaaaacauuguu

SEQ ID NO: 5377 - RNA, 22 nt, Artificial Sequence
  Description of Artificial Sequence: Synthetic oligonucleotide
gcuucagacauaaaaacauugu

SEQ ID NO: 5378 - RNA, 22 nt, Artificial Sequence
  Description of Artificial Sequence: Synthetic oligonucleotide
uacacuaugcgagcagaagggu

SEQ ID NO: 5379 - RNA, 22 nt, Artificial Sequence
  Description of Artificial Sequence: Synthetic oligonucleotide
uauacacuaugcgagcagaagg

SEQ ID NO: 5380 - RNA, 22 nt, Artificial Sequence
  Description of Artificial Sequence: Synthetic oligonucleotide
guauacacuaugcgagcagaag

SEQ ID NO: 5381 - RNA, 22 nt, Artificial Sequence
  Description of Artificial Sequence: Synthetic oligonucleotide
cgcuuaacaaagcacucgugga

SEQ ID NO: 5382 - RNA, 22 nt, Artificial Sequence
  Description of Artificial Sequence: Synthetic oligonucleotide
gcuuaacaaagcacucguggac

SEQ ID NO: 5383 - RNA, 22 nt, Artificial Sequence
  Description of Artificial Sequence: Synthetic oligonucleotide
uuuccaacuuacguugcauggc

SEQ ID NO: 5384 - RNA, 22 nt, Artificial Sequence
  Description of Artificial Sequence: Synthetic oligonucleotide
auggcuaguguaacuagcaaga

SEQ ID NO: 5385 - RNA, 22 nt, Artificial Sequence
  Description of Artificial Sequence: Synthetic oligonucleotide
gauggcuaguguaacuagcaag

SEQ ID NO: 5386 - RNA, 22 nt, Artificial Sequence
  Description of Artificial Sequence: Synthetic oligonucleotide
aguguaacuagcaagaauacca

SEQ ID NO: 5387 - RNA, 22 nt, Artificial Sequence
  Description of Artificial Sequence: Synthetic oligonucleotide
uaguguaacuagcaagaauacc

SEQ ID NO: 5388 - RNA, 22 nt, Artificial Sequence
  Description of Artificial Sequence: Synthetic oligonucleotide
uguaacuagcaagaauaccacg

SEQ ID NO: 5389 - RNA, 22 nt, Artificial Sequence
  Description of Artificial Sequence: Synthetic oligonucleotide
guguaacuagcaagaauaccac

SEQ ID NO: 5390 - RNA, 22 nt, Artificial Sequence
  Description of Artificial Sequence: Synthetic oligonucleotide
ggcuaguguaacuagcaagaau

SEQ ID NO: 5391 - RNA, 22 nt, Artificial Sequence
  Description of Artificial Sequence: Synthetic oligonucleotide
cuaguguaacuagcaagaauac

SEQ ID NO: 5392 - RNA, 22 nt, Artificial Sequence
  Description of Artificial Sequence: Synthetic oligonucleotide
gcuaguguaacuagcaagaaua

SEQ ID NO: 5393 - RNA, 22 nt, Artificial Sequence
  Description of Artificial Sequence: Synthetic oligonucleotide
ccuuuccacaaaaaucaacucu

SEQ ID NO: 5394 - RNA, 22 nt, Artificial Sequence
  Description of Artificial Sequence: Synthetic oligonucleotide
uuugauuguccaaguacacacu

SEQ ID NO: 5395 - RNA, 22 nt, Artificial Sequence
  Description of Artificial Sequence: Synthetic oligonucleotide
uagcccuuuccacaaaaaucaa

SEQ ID NO: 5396 - RNA, 22 nt, Artificial Sequence
  Description of Artificial Sequence: Synthetic oligonucleotide
agcccuuuccacaaaaaucaac

SEQ ID NO: 5397 - RNA, 22 nt, Artificial Sequence
  Description of Artificial Sequence: Synthetic oligonucleotide
gcccuuuccacaaaaaucaacu

SEQ ID NO: 5398 - RNA, 22 nt, Artificial Sequence
  Description of Artificial Sequence: Synthetic oligonucleotide
cccuuuccacaaaaaucaacuc

SEQ ID NO: 5399 - RNA, 22 nt, Artificial Sequence
  Description of Artificial Sequence: Synthetic oligonucleotide
ugcugaugaucggcugcaacac

SEQ ID NO: 5400 - RNA, 22 nt, Artificial Sequence
  Description of Artificial Sequence: Synthetic oligonucleotide
gcugaugaucggcugcaacacg

SEQ ID NO: 5401 - RNA, 22 nt, Artificial Sequence
  Description of Artificial Sequence: Synthetic oligonucleotide
cugaugaucggcugcaacacgg

SEQ ID NO: 5402 - RNA, 22 nt, Artificial Sequence
  Description of Artificial Sequence: Synthetic oligonucleotide
ugaugaucggcugcaacacgga

SEQ ID NO: 5403 - RNA, 22 nt, Artificial Sequence
  Description of Artificial Sequence: Synthetic oligonucleotide
gaugaucggcugcaacacggac

SEQ ID NO: 5404 - RNA, 22 nt, Artificial Sequence
  Description of Artificial Sequence: Synthetic oligonucleotide
augaucggcugcaacacggacg

SEQ ID NO: 5405 - RNA, 22 nt, Artificial Sequence
  Description of Artificial Sequence: Synthetic oligonucleotide
acaccacagaaaacuccuggua

SEQ ID NO: 5406 - RNA, 22 nt, Artificial Sequence
  Description of Artificial Sequence: Synthetic oligonucleotide
acagauagagacaccagcuacg

SEQ ID NO: 5407 - RNA, 22 nt, Artificial Sequence
  Description of Artificial Sequence: Synthetic oligonucleotide
uacagauagagacaccagcuac

SEQ ID NO: 5408 - RNA, 22 nt, Artificial Sequence
  Description of Artificial Sequence: Synthetic oligonucleotide
agacaccagcuacggugcgagc

SEQ ID NO: 5409 - RNA, 22 nt, Artificial Sequence
  Description of Artificial Sequence: Synthetic oligonucleotide
gagacaccagcuacggugcgag

SEQ ID NO: 5410 - RNA, 22 nt, Artificial Sequence
  Description of Artificial Sequence: Synthetic oligonucleotide
agagacaccagcuacggugcga

SEQ ID NO: 5411 - RNA, 22 nt, Artificial Sequence
  Description of Artificial Sequence: Synthetic oligonucleotide
uagagacaccagcuacggugcg

SEQ ID NO: 5412 - RNA, 22 nt, Artificial Sequence
  Description of Artificial Sequence: Synthetic oligonucleotide
auagagacaccagcuacggugc

SEQ ID NO: 5413 - RNA, 22 nt, Artificial Sequence
  Description of Artificial Sequence: Synthetic oligonucleotide
gauagagacaccagcuacggug

SEQ ID NO: 5414 - RNA, 22 nt, Artificial Sequence
  Description of Artificial Sequence: Synthetic oligonucleotide
agauagagacaccagcuacggu

SEQ ID NO: 5415 - RNA, 22 nt, Artificial Sequence
  Description of Artificial Sequence: Synthetic oligonucleotide
cagauagagacaccagcuacgg

SEQ ID NO: 5416 - RNA, 22 nt, Artificial Sequence
  Description of Artificial Sequence: Synthetic oligonucleotide
cucccucaguugcaacccauau

SEQ ID NO: 5417 - RNA, 22 nt, Artificial Sequence
  Description of Artificial Sequence: Synthetic oligonucleotide
ucccucaguugcaacccauaug

SEQ ID NO: 5418 - RNA, 22 nt, Artificial Sequence
  Description of Artificial Sequence: Synthetic oligonucleotide
cccucaguugcaacccauauga

SEQ ID NO: 5419 - RNA, 22 nt, Artificial Sequence
  Description of Artificial Sequence: Synthetic oligonucleotide
ccucaguugcaacccauaugau

SEQ ID NO: 5420 - RNA, 22 nt, Artificial Sequence
  Description of Artificial Sequence: Synthetic oligonucleotide
aaggcucccucaguugcaaccc

SEQ ID NO: 5421 - RNA, 22 nt, Artificial Sequence
  Description of Artificial Sequence: Synthetic oligonucleotide
aggcucccucaguugcaaccca

SEQ ID NO: 5422 - RNA, 22 nt, Artificial Sequence
  Description of Artificial Sequence: Synthetic oligonucleotide
ggcucccucaguugcaacccau

SEQ ID NO: 5423 - RNA, 22 nt, Artificial Sequence
  Description of Artificial Sequence: Synthetic oligonucleotide
gcucccucaguugcaacccaua

SEQ ID NO: 5424 - RNA, 22 nt, Artificial Sequence
  Description of Artificial Sequence: Synthetic oligonucleotide
ucaaggcucccucaguugcaac

SEQ ID NO: 5425 - RNA, 22 nt, Artificial Sequence
  Description of Artificial Sequence: Synthetic oligonucleotide
caaggcucccucaguugcaacc

SEQ ID NO: 5426 - RNA, 22 nt, Artificial Sequence
  Description of Artificial Sequence: Synthetic oligonucleotide
acauaucuaaaacggcaauucc

SEQ ID NO: 5427 - RNA, 22 nt, Artificial Sequence
  Description of Artificial Sequence: Synthetic oligonucleotide
aggucagucucaguccaacauu

SEQ ID NO: 5428 - RNA, 22 nt, Artificial Sequence
  Description of Artificial Sequence: Synthetic oligonucleotide
ggucagucucaguccaacauuu

SEQ ID NO: 5429 - RNA, 22 nt, Artificial Sequence
  Description of Artificial Sequence: Synthetic oligonucleotide
ugucuguaguaaugauuugugg

SEQ ID NO: 5430 - RNA, 22 nt, Artificial Sequence
  Description of Artificial Sequence: Synthetic oligonucleotide
uugucuguaguaaugauuugug

SEQ ID NO: 5431 - RNA, 22 nt, Artificial Sequence
  Description of Artificial Sequence: Synthetic oligonucleotide
acacuaugcgagcagaagggua

SEQ ID NO: 5432 - RNA, 22 nt, Artificial Sequence
  Description of Artificial Sequence: Synthetic oligonucleotide
auacacuaugcgagcagaaggg

SEQ ID NO: 5433 - RNA, 22 nt, Artificial Sequence
  Description of Artificial Sequence: Synthetic oligonucleotide
cuguauacacuaugcgagcaga

SEQ ID NO: 5434 - RNA, 22 nt, Artificial Sequence
  Description of Artificial Sequence: Synthetic oligonucleotide
gcuguauacacuaugcgagcag

SEQ ID NO: 5435 - RNA, 22 nt, Artificial Sequence
  Description of Artificial Sequence: Synthetic oligonucleotide
ggugguugguaaagaacaucag

SEQ ID NO: 5436 - RNA, 22 nt, Artificial Sequence
  Description of Artificial Sequence: Synthetic oligonucleotide
aaaccaacacuaccacaugaac

SEQ ID NO: 5437 - RNA, 22 nt, Artificial Sequence
  Description of Artificial Sequence: Synthetic oligonucleotide
aaaaccaacacuaccacaugaa

SEQ ID NO: 5438 - RNA, 22 nt, Artificial Sequence
  Description of Artificial Sequence: Synthetic oligonucleotide
acacuaccacaugaaccauuaa

SEQ ID NO: 5439 - RNA, 22 nt, Artificial Sequence
  Description of Artificial Sequence: Synthetic oligonucleotide
aacacuaccacaugaaccauua

SEQ ID NO: 5440 - RNA, 22 nt, Artificial Sequence
  Description of Artificial Sequence: Synthetic oligonucleotide
acuaccacaugaaccauuaagg

SEQ ID NO: 5441 - RNA, 22 nt, Artificial Sequence
  Description of Artificial Sequence: Synthetic oligonucleotide
cacuaccacaugaaccauuaag

SEQ ID NO: 5442 - RNA, 22 nt, Artificial Sequence
  Description of Artificial Sequence: Synthetic oligonucleotide
accaacacuaccacaugaacca

SEQ ID NO: 5443 - RNA, 22 nt, Artificial Sequence
  Description of Artificial Sequence: Synthetic oligonucleotide
aaccaacacuaccacaugaacc

SEQ ID NO: 5444 - RNA, 22 nt, Artificial Sequence
  Description of Artificial Sequence: Synthetic oligonucleotide
caacacuaccacaugaaccauu

SEQ ID NO: 5445 - RNA, 22 nt, Artificial Sequence
  Description of Artificial Sequence: Synthetic oligonucleotide
ccaacacuaccacaugaaccau

SEQ ID NO: 5446 - RNA, 22 nt, Artificial Sequence
  Description of Artificial Sequence: Synthetic oligonucleotide
aucuuaccuuucggucacaccc

SEQ ID NO: 5447 - RNA, 22 nt, Artificial Sequence
  Description of Artificial Sequence: Synthetic oligonucleotide
ucuuaccuuucggucacacccg

SEQ ID NO: 5448 - RNA, 22 nt, Artificial Sequence
  Description of Artificial Sequence: Synthetic oligonucleotide
cuuaccuuucggucacacccgg

SEQ ID NO: 5449 - RNA, 22 nt, Artificial Sequence
  Description of Artificial Sequence: Synthetic oligonucleotide
uuaccuuucggucacacccgga

SEQ ID NO: 5450 - RNA, 22 nt, Artificial Sequence
  Description of Artificial Sequence: Synthetic oligonucleotide
cuccaucuuaccuuucggucac

SEQ ID NO: 5451 - RNA, 22 nt, Artificial Sequence
  Description of Artificial Sequence: Synthetic oligonucleotide
uccaucuuaccuuucggucaca

SEQ ID NO: 5452 - RNA, 22 nt, Artificial Sequence
  Description of Artificial Sequence: Synthetic oligonucleotide
ccaucuuaccuuucggucacac

SEQ ID NO: 5453 - RNA, 22 nt, Artificial Sequence
  Description of Artificial Sequence: Synthetic oligonucleotide
caucuuaccuuucggucacacc

SEQ ID NO: 5454 - RNA, 22 nt, Artificial Sequence
  Description of Artificial Sequence: Synthetic oligonucleotide
cucuccaucuuaccuuucgguc

SEQ ID NO: 5455 - RNA, 22 nt, Artificial Sequence
  Description of Artificial Sequence: Synthetic oligonucleotide
ucuccaucuuaccuuucgguca

SEQ ID NO: 5456 - RNA, 22 nt, Artificial Sequence
  Description of Artificial Sequence: Synthetic oligonucleotide
uccccuacugcugccuggaguu

SEQ ID NO: 5457 - RNA, 22 nt, Artificial Sequence
  Description of Artificial Sequence: Synthetic oligonucleotide
uggcuaguguaacuagcaagaa

SEQ ID NO: 5458 - RNA, 22 nt, Artificial Sequence
  Description of Artificial Sequence: Synthetic oligonucleotide
uuccccuacugcugccuggagu

SEQ ID NO: 5459 - RNA, 22 nt, Artificial Sequence
  Description of Artificial Sequence: Synthetic oligonucleotide
cauccaaacaguuaacacaauu

SEQ ID NO: 5460 - RNA, 22 nt, Artificial Sequence
  Description of Artificial Sequence: Synthetic oligonucleotide
ucauccaaacaguuaacacaau

SEQ ID NO: 5461 - RNA, 22 nt, Artificial Sequence
  Description of Artificial Sequence: Synthetic oligonucleotide
cuacugcugccuggaguugaau

SEQ ID NO: 5462 - RNA, 22 nt, Artificial Sequence
  Description of Artificial Sequence: Synthetic oligonucleotide
ccuacugcugccuggaguugaa

SEQ ID NO: 5463 - RNA, 22 nt, Artificial Sequence
  Description of Artificial Sequence: Synthetic oligonucleotide
aucaucaucacaacaauuguau

SEQ ID NO: 5464 - RNA, 22 nt, Artificial Sequence
  Description of Artificial Sequence: Synthetic oligonucleotide
ucaucaucacaacaauuguaug

SEQ ID NO: 5465 - RNA, 22 nt, Artificial Sequence
  Description of Artificial Sequence: Synthetic oligonucleotide
ucaucacaacaauuguauguga

SEQ ID NO: 5466 - RNA, 22 nt, Artificial Sequence
  Description of Artificial Sequence: Synthetic oligonucleotide
caucacaacaauuguaugugac

SEQ ID NO: 5467 - RNA, 22 nt, Artificial Sequence
  Description of Artificial Sequence: Synthetic oligonucleotide
caucaucacaacaauuguaugu

SEQ ID NO: 5468 - RNA, 22 nt, Artificial Sequence
  Description of Artificial Sequence: Synthetic oligonucleotide
aucaucacaacaauuguaugug

SEQ ID NO: 5469 - RNA, 22 nt, Artificial Sequence
  Description of Artificial Sequence: Synthetic oligonucleotide
uagucauaaucgcugauagcag

SEQ ID NO: 5470 - RNA, 22 nt, Artificial Sequence
  Description of Artificial Sequence: Synthetic oligonucleotide
agucauaaucgcugauagcagc

SEQ ID NO: 5471 - RNA, 22 nt, Artificial Sequence
  Description of Artificial Sequence: Synthetic oligonucleotide
ugaauugaaauauucugguucu

SEQ ID NO: 5472 - RNA, 22 nt, Artificial Sequence
  Description of Artificial Sequence: Synthetic oligonucleotide
acugaauugaaauauucugguu

SEQ ID NO: 5473 - RNA, 22 nt, Artificial Sequence
  Description of Artificial Sequence: Synthetic oligonucleotide
cacugaauugaaauauucuggu

SEQ ID NO: 5474 - RNA, 22 nt, Artificial Sequence
  Description of Artificial Sequence: Synthetic oligonucleotide
acacugaauugaaauauucugg

SEQ ID NO: 5475 - RNA, 22 nt, Artificial Sequence
  Description of Artificial Sequence: Synthetic oligonucleotide
gucaugauugcaucacaacuag

SEQ ID NO: 5476 - RNA, 22 nt, Artificial Sequence
  Description of Artificial Sequence: Synthetic oligonucleotide
ucaugauugcaucacaacuagc

SEQ ID NO: 5477 - RNA, 22 nt, Artificial Sequence
  Description of Artificial Sequence: Synthetic oligonucleotide
uagucaugauugcaucacaacu

SEQ ID NO: 5478 - RNA, 22 nt, Artificial Sequence
  Description of Artificial Sequence: Synthetic oligonucleotide
agucaugauugcaucacaacua

SEQ ID NO: 5479 - RNA, 22 nt, Artificial Sequence
  Description of Artificial Sequence: Synthetic oligonucleotide
cuagucaugauugcaucacaac

SEQ ID NO: 5480 - RNA, 22 nt, Artificial Sequence
  Description of Artificial Sequence: Synthetic oligonucleotide
uaaaaauuguacauucagcagc

SEQ ID NO: 5481 - RNA, 22 nt, Artificial Sequence
  Description of Artificial Sequence: Synthetic oligonucleotide
uuaaaaauuguacauucagcag

SEQ ID NO: 5482 - RNA, 22 nt, Artificial Sequence
  Description of Artificial Sequence: Synthetic oligonucleotide
aucauugagaaauguuuacgca

SEQ ID NO: 5483 - RNA, 22 nt, Artificial Sequence
  Description of Artificial Sequence: Synthetic oligonucleotide
uaauaagaaagcguucgugaug

SEQ ID NO: 5484 - RNA, 22 nt, Artificial Sequence
  Description of Artificial Sequence: Synthetic oligonucleotide
uguaauaagaaagcguucguga

SEQ ID NO: 5485 - RNA, 22 nt, Artificial Sequence
  Description of Artificial Sequence: Synthetic oligonucleotide
guaauaagaaagcguucgugau

SEQ ID NO: 5486 - RNA, 22 nt, Artificial Sequence
  Description of Artificial Sequence: Synthetic oligonucleotide
uuuguaauaagaaagcguucgu

SEQ ID NO: 5487 - RNA, 22 nt, Artificial Sequence
  Description of Artificial Sequence: Synthetic oligonucleotide
aauuuguaauaagaaagcguuc

SEQ ID NO: 5488 - RNA, 22 nt, Artificial Sequence
  Description of Artificial Sequence: Synthetic oligonucleotide
auuuguaauaagaaagcguucg

SEQ ID NO: 5489 - RNA, 22 nt, Artificial Sequence
  Description of Artificial Sequence: Synthetic oligonucleotide
ccaauuuguaauaagaaagcgu

SEQ ID NO: 5490 - RNA, 22 nt, Artificial Sequence
  Description of Artificial Sequence: Synthetic oligonucleotide
caauuuguaauaagaaagcguu

SEQ ID NO: 5491 - RNA, 22 nt, Artificial Sequence
  Description of Artificial Sequence: Synthetic oligonucleotide
aaaacccaucauagagaugagu

SEQ ID NO: 5492 - RNA, 22 nt, Artificial Sequence
  Description of Artificial Sequence: Synthetic oligonucleotide
aaacccaucauagagaugaguc

SEQ ID NO: 5493 - RNA, 22 nt, Artificial Sequence
  Description of Artificial Sequence: Synthetic oligonucleotide
uuaaaacccaucauagagauga

SEQ ID NO: 5494 - RNA, 22 nt, Artificial Sequence
  Description of Artificial Sequence: Synthetic oligonucleotide
uaaaacccaucauagagaugag

SEQ ID NO: 5495 - RNA, 22 nt, Artificial Sequence
  Description of Artificial Sequence: Synthetic oligonucleotide
uuuaaaacccaucauagagaug

SEQ ID NO: 5496 - RNA, 22 nt, Artificial Sequence
  Description of Artificial Sequence: Synthetic oligonucleotide
aacaccauuacgggcauuucua

SEQ ID NO: 5497 - RNA, 22 nt, Artificial Sequence
  Description of Artificial Sequence: Synthetic oligonucleotide
acaccauuacgggcauuucuaa

SEQ ID NO: 5498 - RNA, 22 nt, Artificial Sequence
  Description of Artificial Sequence: Synthetic oligonucleotide
caccauuacgggcauuucuaaa

SEQ ID NO: 5499 - RNA, 22 nt, Artificial Sequence
  Description of Artificial Sequence: Synthetic oligonucleotide
ucugguaauuuauaauuauaau

SEQ ID NO: 5500 - RNA, 22 nt, Artificial Sequence
  Description of Artificial Sequence: Synthetic oligonucleotide
aucugguaauuuauaauuauaa

SEQ ID NO: 5501 - RNA, 22 nt, Artificial Sequence
  Description of Artificial Sequence: Synthetic oligonucleotide
ugguaauuuauaauuauaauca

SEQ ID NO: 5502 - RNA, 22 nt, Artificial Sequence
  Description of Artificial Sequence: Synthetic oligonucleotide
cugguaauuuauaauuauaauc

SEQ ID NO: 5503 - RNA, 22 nt, Artificial Sequence
  Description of Artificial Sequence: Synthetic oligonucleotide
guaauuuauaauuauaaucagc

SEQ ID NO: 5504 - RNA, 22 nt, Artificial Sequence
  Description of Artificial Sequence: Synthetic oligonucleotide
gguaauuuauaauuauaaucag

SEQ ID NO: 5505 - RNA, 22 nt, Artificial Sequence
  Description of Artificial Sequence: Synthetic oligonucleotide
caucugguaauuuauaauuaua

SEQ ID NO: 5506 - RNA, 22 nt, Artificial Sequence
  Description of Artificial Sequence: Synthetic oligonucleotide
ucaucugguaauuuauaauuau

SEQ ID NO: 5507 - RNA, 22 nt, Artificial Sequence
  Description of Artificial Sequence: Synthetic oligonucleotide
acggcaauuccaguuugagcag

SEQ ID NO: 5508 - RNA, 22 nt, Artificial Sequence
  Description of Artificial Sequence: Synthetic oligonucleotide
cggcaauuccaguuugagcaga

SEQ ID NO: 5509 - RNA, 22 nt, Artificial Sequence
  Description of Artificial Sequence: Synthetic oligonucleotide
uuacaagagugagcuguuucag

SEQ ID NO: 5510 - RNA, 22 nt, Artificial Sequence
  Description of Artificial Sequence: Synthetic oligonucleotide
cuacaguacucagaaucaaaag

SEQ ID NO: 5511 - RNA, 22 nt, Artificial Sequence
  Description of Artificial Sequence: Synthetic oligonucleotide
uacaguacucagaaucaaaagu

SEQ ID NO: 5512 - RNA, 22 nt, Artificial Sequence
  Description of Artificial Sequence: Synthetic oligonucleotide
uucagauuuagccacauucaaa

SEQ ID NO: 5513 - RNA, 22 nt, Artificial Sequence
  Description of Artificial Sequence: Synthetic oligonucleotide
agcagcagauuucuuagugaca

SEQ ID NO: 5514 - RNA, 22 nt, Artificial Sequence
  Description of Artificial Sequence: Synthetic oligonucleotide
ucaguacuagugccugugccgc

SEQ ID NO: 5515 - RNA, 22 nt, Artificial Sequence
  Description of Artificial Sequence: Synthetic oligonucleotide
cuagugccugugccgcacggug

SEQ ID NO: 5516 - RNA, 22 nt, Artificial Sequence
  Description of Artificial Sequence: Synthetic oligonucleotide
acuagugccugugccgcacggu

SEQ ID NO: 5517 - RNA, 22 nt, Artificial Sequence
  Description of Artificial Sequence: Synthetic oligonucleotide
agugccugugccgcacggugua

SEQ ID NO: 5518 - RNA, 22 nt, Artificial Sequence
  Description of Artificial Sequence: Synthetic oligonucleotide
uagugccugugccgcacggugu

SEQ ID NO: 5519 - RNA, 22 nt, Artificial Sequence
  Description of Artificial Sequence: Synthetic oligonucleotide
aguacuagugccugugccgcac

SEQ ID NO: 5520 - RNA, 22 nt, Artificial Sequence
  Description of Artificial Sequence: Synthetic oligonucleotide
caguacuagugccugugccgca

SEQ ID NO: 5521 - RNA, 22 nt, Artificial Sequence
  Description of Artificial Sequence: Synthetic oligonucleotide
uacuagugccugugccgcacgg

SEQ ID NO: 5522 - RNA, 22 nt, Artificial Sequence
  Description of Artificial Sequence: Synthetic oligonucleotide
guacuagugccugugccgcacg

SEQ ID NO: 5523 - RNA, 22 nt, Artificial Sequence
  Description of Artificial Sequence: Synthetic oligonucleotide
uugcgcuuagcccaaagcucaa

SEQ ID NO: 5524 - RNA, 22 nt, Artificial Sequence
  Description of Artificial Sequence: Synthetic oligonucleotide
ugcgcuuagcccaaagcucaaa

SEQ ID NO: 5525 - RNA, 22 nt, Artificial Sequence
  Description of Artificial Sequence: Synthetic oligonucleotide
uuagcccaaagcucaaaugcua

SEQ ID NO: 5526 - RNA, 22 nt, Artificial Sequence
  Description of Artificial Sequence: Synthetic oligonucleotide
uagcccaaagcucaaaugcuac

SEQ ID NO: 5527 - RNA, 22 nt, Artificial Sequence
  Description of Artificial Sequence: Synthetic oligonucleotide
agcccaaagcucaaaugcuaca

SEQ ID NO: 5528 - RNA, 22 nt, Artificial Sequence
  Description of Artificial Sequence: Synthetic oligonucleotide
gcccaaagcucaaaugcuacau

SEQ ID NO: 5529 - RNA, 22 nt, Artificial Sequence
  Description of Artificial Sequence: Synthetic oligonucleotide
gcgcuuagcccaaagcucaaau

SEQ ID NO: 5530 - RNA, 22 nt, Artificial Sequence
  Description of Artificial Sequence: Synthetic oligonucleotide
cgcuuagcccaaagcucaaaug

SEQ ID NO: 5531 - RNA, 22 nt, Artificial Sequence
  Description of Artificial Sequence: Synthetic oligonucleotide
gcuuagcccaaagcucaaaugc

SEQ ID NO: 5532 - RNA, 22 nt, Artificial Sequence
  Description of Artificial Sequence: Synthetic oligonucleotide
cuuagcccaaagcucaaaugcu

SEQ ID NO: 5533 - RNA, 22 nt, Artificial Sequence
  Description of Artificial Sequence: Synthetic oligonucleotide
gagacaaagucauuaagaucug

SEQ ID NO: 5534 - RNA, 22 nt, Artificial Sequence
  Description of Artificial Sequence: Synthetic oligonucleotide
gacaaagucauuaagaucugaa

SEQ ID NO: 5535 - RNA, 22 nt, Artificial Sequence
  Description of Artificial Sequence: Synthetic oligonucleotide
agacaaagucauuaagaucuga

SEQ ID NO: 5536 - RNA, 22 nt, Artificial Sequence
  Description of Artificial Sequence: Synthetic oligonucleotide
ucuuaccaguaccagguggucc

SEQ ID NO: 5537 - RNA, 22 nt, Artificial Sequence
  Description of Artificial Sequence: Synthetic oligonucleotide
guaccagguggucccuggagug

SEQ ID NO: 5538 - RNA, 22 nt, Artificial Sequence
  Description of Artificial Sequence: Synthetic oligonucleotide
uaccagguggucccuggagugu

SEQ ID NO: 5539 - RNA, 22 nt, Artificial Sequence
  Description of Artificial Sequence: Synthetic oligonucleotide
uuaccaguaccagguggucccu

SEQ ID NO: 5540 - RNA, 22 nt, Artificial Sequence
  Description of Artificial Sequence: Synthetic oligonucleotide
uaccaguaccagguggucccug

SEQ ID NO: 5541 - RNA, 22 nt, Artificial Sequence
  Description of Artificial Sequence: Synthetic oligonucleotide
accaguaccagguggucccugg

SEQ ID NO: 5542 - RNA, 22 nt, Artificial Sequence
  Description of Artificial Sequence: Synthetic oligonucleotide
ccaguaccagguggucccugga

SEQ ID NO: 5543 - RNA, 22 nt, Artificial Sequence
  Description of Artificial Sequence: Synthetic oligonucleotide
aagcaucuauagcuaaagacac

SEQ ID NO: 5544 - RNA, 22 nt, Artificial Sequence
  Description of Artificial Sequence: Synthetic oligonucleotide
guaagcaucuauagcuaaagac

SEQ ID NO: 5545 - RNA, 22 nt, Artificial Sequence
  Description of Artificial Sequence: Synthetic oligonucleotide
uaagcaucuauagcuaaagaca

SEQ ID NO: 5546 - RNA, 22 nt, Artificial Sequence
  Description of Artificial Sequence: Synthetic oligonucleotide
ggguaagcaucuauagcuaaag

SEQ ID NO: 5547 - RNA, 22 nt, Artificial Sequence
  Description of Artificial Sequence: Synthetic oligonucleotide
gguaagcaucuauagcuaaaga

SEQ ID NO: 5548 - RNA, 22 nt, Artificial Sequence
  Description of Artificial Sequence: Synthetic oligonucleotide
ugcuuacaaaggcacgcuagua

SEQ ID NO: 5549 - RNA, 22 nt, Artificial Sequence
  Description of Artificial Sequence: Synthetic oligonucleotide
gcuuacaaaggcacgcuaguag

SEQ ID NO: 5550 - RNA, 22 nt, Artificial Sequence
  Description of Artificial Sequence: Synthetic oligonucleotide
uacaaaggcacgcuaguagucg

SEQ ID NO: 5551 - RNA, 22 nt, Artificial Sequence
  Description of Artificial Sequence: Synthetic oligonucleotide
acaaaggcacgcuaguagucgu

SEQ ID NO: 5552 - RNA, 22 nt, Artificial Sequence
  Description of Artificial Sequence: Synthetic oligonucleotide
cuuacaaaggcacgcuaguagu

SEQ ID NO: 5553 - RNA, 22 nt, Artificial Sequence
  Description of Artificial Sequence: Synthetic oligonucleotide
uuacaaaggcacgcuaguaguc

SEQ ID NO: 5554 - RNA, 22 nt, Artificial Sequence
  Description of Artificial Sequence: Synthetic oligonucleotide
aaggcacgcuaguagucgucgu

SEQ ID NO: 5555 - RNA, 22 nt, Artificial Sequence
  Description of Artificial Sequence: Synthetic oligonucleotide
aggcacgcuaguagucgucguc

SEQ ID NO: 5556 - RNA, 22 nt, Artificial Sequence
  Description of Artificial Sequence: Synthetic oligonucleotide
caaaggcacgcuaguagucguc

SEQ ID NO: 5557 - RNA, 22 nt, Artificial Sequence
  Description of Artificial Sequence: Synthetic oligonucleotide
aaaggcacgcuaguagucgucg

SEQ ID NO: 5558 - RNA, 22 nt, Artificial Sequence
  Description of Artificial Sequence: Synthetic oligonucleotide
gcgaaaacguuuauauagccca

SEQ ID NO: 5559 - RNA, 22 nt, Artificial Sequence
  Description of Artificial Sequence: Synthetic oligonucleotide
gaaaacguuuauauagcccauc

SEQ ID NO: 5560 - RNA, 22 nt, Artificial Sequence
  Description of Artificial Sequence: Synthetic oligonucleotide
cgaaaacguuuauauagcccau

SEQ ID NO: 5561 - RNA, 22 nt, Artificial Sequence
  Description of Artificial Sequence: Synthetic oligonucleotide
acacauugagcccacaauuuag

SEQ ID NO: 5562 - RNA, 22 nt, Artificial Sequence
  Description of Artificial Sequence: Synthetic oligonucleotide
aacagcuguaccuggugcaacu

SEQ ID NO: 5563 - RNA, 22 nt, Artificial Sequence
  Description of Artificial Sequence: Synthetic oligonucleotide
acagcuguaccuggugcaacuc

SEQ ID NO: 5564 - RNA, 22 nt, Artificial Sequence
  Description of Artificial Sequence: Synthetic oligonucleotide
cagcuguaccuggugcaacucc

SEQ ID NO: 5565 - RNA, 22 nt, Artificial Sequence
  Description of Artificial Sequence: Synthetic oligonucleotide
ucacauuuaggauaaucccaac

SEQ ID NO: 5566 - RNA, 22 nt, Artificial Sequence
  Description of Artificial Sequence: Synthetic oligonucleotide
uaggauaaucccaacccauaag

SEQ ID NO: 5567 - RNA, 22 nt, Artificial Sequence
  Description of Artificial Sequence: Synthetic oligonucleotide
aggauaaucccaacccauaagg

SEQ ID NO: 5568 - RNA, 22 nt, Artificial Sequence
  Description of Artificial Sequence: Synthetic oligonucleotide
uuuaggauaaucccaacccaua

SEQ ID NO: 5569 - RNA, 22 nt, Artificial Sequence
  Description of Artificial Sequence: Synthetic oligonucleotide
uuaggauaaucccaacccauaa

SEQ ID NO: 5570 - RNA, 22 nt, Artificial Sequence
  Description of Artificial Sequence: Synthetic oligonucleotide
cauuuaggauaaucccaaccca

SEQ ID NO: 5571 - RNA, 22 nt, Artificial Sequence
  Description of Artificial Sequence: Synthetic oligonucleotide
auuuaggauaaucccaacccau

SEQ ID NO: 5572 - RNA, 22 nt, Artificial Sequence
  Description of Artificial Sequence: Synthetic oligonucleotide
cacauuuaggauaaucccaacc

SEQ ID NO: 5573 - RNA, 22 nt, Artificial Sequence
  Description of Artificial Sequence: Synthetic oligonucleotide
acauuuaggauaaucccaaccc

SEQ ID NO: 5574 - RNA, 22 nt, Artificial Sequence
  Description of Artificial Sequence: Synthetic oligonucleotide
caacaauuucagcaggacaacg

SEQ ID NO: 5575 - RNA, 22 nt, Artificial Sequence
  Description of Artificial Sequence: Synthetic oligonucleotide
uauaugcgaaaagugcaucuug

SEQ ID NO: 5576 - RNA, 22 nt, Artificial Sequence
  Description of Artificial Sequence: Synthetic oligonucleotide
auaugcgaaaagugcaucuuga

SEQ ID NO: 5577 - RNA, 22 nt, Artificial Sequence
  Description of Artificial Sequence: Synthetic oligonucleotide
cgaaaagugcaucuugauccuc

SEQ ID NO: 5578 - RNA, 22 nt, Artificial Sequence
  Description of Artificial Sequence: Synthetic oligonucleotide
gaaaagugcaucuugauccuca

SEQ ID NO: 5579 - RNA, 22 nt, Artificial Sequence
  Description of Artificial Sequence: Synthetic oligonucleotide
aaaagugcaucuugauccucau

SEQ ID NO: 5580 - RNA, 22 nt, Artificial Sequence
  Description of Artificial Sequence: Synthetic oligonucleotide
aaagugcaucuugauccucaua

SEQ ID NO: 5581 - RNA, 22 nt, Artificial Sequence
  Description of Artificial Sequence: Synthetic oligonucleotide
uaugcgaaaagugcaucuugau

SEQ ID NO: 5582 - RNA, 22 nt, Artificial Sequence
  Description of Artificial Sequence: Synthetic oligonucleotide
augcgaaaagugcaucuugauc

SEQ ID NO: 5583 - RNA, 22 nt, Artificial Sequence
  Description of Artificial Sequence: Synthetic oligonucleotide
ugcgaaaagugcaucuugaucc

SEQ ID NO: 5584 - RNA, 22 nt, Artificial Sequence
  Description of Artificial Sequence: Synthetic oligonucleotide
gcgaaaagugcaucuugauccu

SEQ ID NO: 5585 - RNA, 22 nt, Artificial Sequence
  Description of Artificial Sequence: Synthetic oligonucleotide
guaacaaaggcuguccaccaug

SEQ ID NO: 5586 - RNA, 22 nt, Artificial Sequence
  Description of Artificial Sequence: Synthetic oligonucleotide
gagagcggugaaccaagacgca

SEQ ID NO: 5587 - RNA, 22 nt, Artificial Sequence
  Description of Artificial Sequence: Synthetic oligonucleotide
gcggugaaccaagacgcaguau

SEQ ID NO: 5588 - RNA, 22 nt, Artificial Sequence
  Description of Artificial Sequence: Synthetic oligonucleotide
agcggugaaccaagacgcagua

SEQ ID NO: 5589 - RNA, 22 nt, Artificial Sequence
  Description of Artificial Sequence: Synthetic oligonucleotide
gagcggugaaccaagacgcagu

SEQ ID NO: 5590 - RNA, 22 nt, Artificial Sequence
  Description of Artificial Sequence: Synthetic oligonucleotide
ugaaccaagacgcaguauuauu

SEQ ID NO: 5591 - RNA, 22 nt, Artificial Sequence
  Description of Artificial Sequence: Synthetic oligonucleotide
gugaaccaagacgcaguauuau

SEQ ID NO: 5592 - RNA, 22 nt, Artificial Sequence
  Description of Artificial Sequence: Synthetic oligonucleotide
ggugaaccaagacgcaguauua

SEQ ID NO: 5593 - RNA, 22 nt, Artificial Sequence
  Description of Artificial Sequence: Synthetic oligonucleotide
cggugaaccaagacgcaguauu

SEQ ID NO: 5594 - RNA, 22 nt, Artificial Sequence
  Description of Artificial Sequence: Synthetic oligonucleotide
ccuugccauguugagugagagc

SEQ ID NO: 5595 - RNA, 22 nt, Artificial Sequence
  Description of Artificial Sequence: Synthetic oligonucleotide
uccuugccauguugagugagag

SEQ ID NO: 5596 - RNA, 22 nt, Artificial Sequence
  Description of Artificial Sequence: Synthetic oligonucleotide
aucacaaccuggagcauugcaa

SEQ ID NO: 5597 - RNA, 22 nt, Artificial Sequence
  Description of Artificial Sequence: Synthetic oligonucleotide
caucacaaccuggagcauugca

SEQ ID NO: 5598 - RNA, 22 nt, Artificial Sequence
  Description of Artificial Sequence: Synthetic oligonucleotide
acaaccuggagcauugcaaaca

SEQ ID NO: 5599 - RNA, 22 nt, Artificial Sequence
  Description of Artificial Sequence: Synthetic oligonucleotide
uuugcgcaucuguuaugaaaua

SEQ ID NO: 5600 - RNA, 22 nt, Artificial Sequence
  Description of Artificial Sequence: Synthetic oligonucleotide
aaccuggagcauugcaaacaua

SEQ ID NO: 5601 - RNA, 22 nt, Artificial Sequence
  Description of Artificial Sequence: Synthetic oligonucleotide
aacaccugagcauugucuaaca

SEQ ID NO: 5602 - RNA, 22 nt, Artificial Sequence
  Description of Artificial Sequence: Synthetic oligonucleotide
acaccugagcauugucuaacaa

SEQ ID NO: 5603 - RNA, 22 nt, Artificial Sequence
  Description of Artificial Sequence: Synthetic oligonucleotide
guaacaccugagcauugucuaa

SEQ ID NO: 5604 - RNA, 22 nt, Artificial Sequence
  Description of Artificial Sequence: Synthetic oligonucleotide
uaacaccugagcauugucuaac

SEQ ID NO: 5605 - RNA, 22 nt, Artificial Sequence
  Description of Artificial Sequence: Synthetic oligonucleotide
ccugagcauugucuaacaacau

SEQ ID NO: 5606 - RNA, 22 nt, Artificial Sequence
  Description of Artificial Sequence: Synthetic oligonucleotide
cugagcauugucuaacaacauc

SEQ ID NO: 5607 - RNA, 22 nt, Artificial Sequence
  Description of Artificial Sequence: Synthetic oligonucleotide
caccugagcauugucuaacaac

SEQ ID NO: 5608 - RNA, 22 nt, Artificial Sequence
  Description of Artificial Sequence: Synthetic oligonucleotide
accugagcauugucuaacaaca

SEQ ID NO: 5609 - RNA, 22 nt, Artificial Sequence
  Description of Artificial Sequence: Synthetic oligonucleotide
gcaucauagaacuuccauucua

SEQ ID NO: 5610 - RNA, 22 nt, Artificial Sequence
  Description of Artificial Sequence: Synthetic oligonucleotide
caucauagaacuuccauucuac

SEQ ID NO: 5611 - RNA, 22 nt, Artificial Sequence
  Description of Artificial Sequence: Synthetic oligonucleotide
aaucaccgaaaucauaccaguu

SEQ ID NO: 5612 - RNA, 22 nt, Artificial Sequence
  Description of Artificial Sequence: Synthetic oligonucleotide
uagaacuuccauucuacaucag

SEQ ID NO: 5613 - RNA, 22 nt, Artificial Sequence
  Description of Artificial Sequence: Synthetic oligonucleotide
agaacuuccauucuacaucagc

SEQ ID NO: 5614 - RNA, 22 nt, Artificial Sequence
  Description of Artificial Sequence: Synthetic oligonucleotide
ucacuuacuguacaagcaaagc

SEQ ID NO: 5615 - RNA, 22 nt, Artificial Sequence
  Description of Artificial Sequence: Synthetic oligonucleotide
gucacuuacuguacaagcaaag

SEQ ID NO: 5616 - RNA, 22 nt, Artificial Sequence
  Description of Artificial Sequence: Synthetic oligonucleotide
uuacuguacaagcaaagcaaua

SEQ ID NO: 5617 - RNA, 22 nt, Artificial Sequence
  Description of Artificial Sequence: Synthetic oligonucleotide
cuuacuguacaagcaaagcaau

SEQ ID NO: 5618 - RNA, 22 nt, Artificial Sequence
  Description of Artificial Sequence: Synthetic oligonucleotide
acuuacuguacaagcaaagcaa

SEQ ID NO: 5619 - RNA, 22 nt, Artificial Sequence
  Description of Artificial Sequence: Synthetic oligonucleotide
cacuuacuguacaagcaaagca

SEQ ID NO: 5620 - RNA, 22 nt, Artificial Sequence
  Description of Artificial Sequence: Synthetic oligonucleotide
uguacaagcaaagcaauauugu

SEQ ID NO: 5621 - RNA, 22 nt, Artificial Sequence
  Description of Artificial Sequence: Synthetic oligonucleotide
cuguacaagcaaagcaauauug

SEQ ID NO: 5622 - RNA, 22 nt, Artificial Sequence
  Description of Artificial Sequence: Synthetic oligonucleotide
acuguacaagcaaagcaauauu

SEQ ID NO: 5623 - RNA, 22 nt, Artificial Sequence
  Description of Artificial Sequence: Synthetic oligonucleotide
uacuguacaagcaaagcaauau

SEQ ID NO: 5624 - RNA, 22 nt, Artificial Sequence
  Description of Artificial Sequence: Synthetic oligonucleotide
aguuguuaacaagaacaucacu

SEQ ID NO: 5625 - RNA, 22 nt, Artificial Sequence
  Description of Artificial Sequence: Synthetic oligonucleotide
uaguuguuaacaagaacaucac

SEQ ID NO: 5626 - RNA, 22 nt, Artificial Sequence
  Description of Artificial Sequence: Synthetic oligonucleotide
uuaacaagaacaucacuagaaa

SEQ ID NO: 5627 - RNA, 22 nt, Artificial Sequence
  Description of Artificial Sequence: Synthetic oligonucleotide
guuaacaagaacaucacuagaa

SEQ ID NO: 5628 - RNA, 22 nt, Artificial Sequence
  Description of Artificial Sequence: Synthetic oligonucleotide
uguuaacaagaacaucacuaga

SEQ ID NO: 5629 - RNA, 22 nt, Artificial Sequence
  Description of Artificial Sequence: Synthetic oligonucleotide
gaaagggagugaggcuuguauc

SEQ ID NO: 5630 - RNA, 22 nt, Artificial Sequence
  Description of Artificial Sequence: Synthetic oligonucleotide
gggagugaggcuuguaucggua

SEQ ID NO: 5631 - RNA, 22 nt, Artificial Sequence
  Description of Artificial Sequence: Synthetic oligonucleotide
ggagugaggcuuguaucgguau

SEQ ID NO: 5632 - RNA, 22 nt, Artificial Sequence
  Description of Artificial Sequence: Synthetic oligonucleotide
aagggagugaggcuuguaucgg

SEQ ID NO: 5633 - RNA, 22 nt, Artificial Sequence
  Description of Artificial Sequence: Synthetic oligonucleotide
gugaggcuuguaucgguaucgu

SEQ ID NO: 5634 - RNA, 22 nt, Artificial Sequence
  Description of Artificial Sequence: Synthetic oligonucleotide
ugaggcuuguaucgguaucguu

SEQ ID NO: 5635 - RNA, 22 nt, Artificial Sequence
  Description of Artificial Sequence: Synthetic oligonucleotide
gagugaggcuuguaucgguauc

SEQ ID NO: 5636 - RNA, 22 nt, Artificial Sequence
  Description of Artificial Sequence: Synthetic oligonucleotide
agugaggcuuguaucgguaucg

SEQ ID NO: 5637 - RNA, 22 nt, Artificial Sequence
  Description of Artificial Sequence: Synthetic oligonucleotide
ucauagccacaagguuaaaguc

SEQ ID NO: 5638 - RNA, 22 nt, Artificial Sequence
  Description of Artificial Sequence: Synthetic oligonucleotide
cauagccacaagguuaaaguca

SEQ ID NO: 5639 - RNA, 22 nt, Artificial Sequence
  Description of Artificial Sequence: Synthetic oligonucleotide
cuucauagccacaagguuaaag

SEQ ID NO: 5640 - RNA, 22 nt, Artificial Sequence
  Description of Artificial Sequence: Synthetic oligonucleotide
uucauagccacaagguuaaagu

SEQ ID NO: 5641 - RNA, 22 nt, Artificial Sequence
  Description of Artificial Sequence: Synthetic oligonucleotide
gccacaagguuaaagucauuaa

SEQ ID NO: 5642 - RNA, 22 nt, Artificial Sequence
  Description of Artificial Sequence: Synthetic oligonucleotide
auagccacaagguuaaagucau

SEQ ID NO: 5643 - RNA, 22 nt, Artificial Sequence
  Description of Artificial Sequence: Synthetic oligonucleotide
uagccacaagguuaaagucauu

SEQ ID NO: 5644 - RNA, 22 nt, Artificial Sequence
  Description of Artificial Sequence: Synthetic oligonucleotide
uacuucauagccacaagguuaa

SEQ ID NO: 5645 - RNA, 22 nt, Artificial Sequence
  Description of Artificial Sequence: Synthetic oligonucleotide
acuucauagccacaagguuaaa

SEQ ID NO: 5646 - RNA, 22 nt, Artificial Sequence
  Description of Artificial Sequence: Synthetic oligonucleotide
uuuggccuuguuguuguuggcc

SEQ ID NO: 5647 - RNA, 22 nt, Artificial Sequence
  Description of Artificial Sequence: Synthetic oligonucleotide
guuuggccuuguuguuguuggc

SEQ ID NO: 5648 - RNA, 22 nt, Artificial Sequence
  Description of Artificial Sequence: Synthetic oligonucleotide
aguuuggccuuguuguuguugg

SEQ ID NO: 5649 - RNA, 22 nt, Artificial Sequence
  Description of Artificial Sequence: Synthetic oligonucleotide
caguuuggccuuguuguuguug

SEQ ID NO: 5650 - RNA, 22 nt, Artificial Sequence
  Description of Artificial Sequence: Synthetic oligonucleotide
acaguuuggccuuguuguuguu

SEQ ID NO: 5651 - RNA, 22 nt, Artificial Sequence
  Description of Artificial Sequence: Synthetic oligonucleotide
ugacaguuuggccuuguuguug

SEQ ID NO: 5652 - RNA, 22 nt, Artificial Sequence
  Description of Artificial Sequence: Synthetic oligonucleotide
gugacaguuuggccuuguuguu

SEQ ID NO: 5653 - RNA, 22 nt, Artificial Sequence
  Description of Artificial Sequence: Synthetic oligonucleotide
agugacaguuuggccuuguugu

SEQ ID NO: 5654 - RNA, 22 nt, Artificial Sequence
  Description of Artificial Sequence: Synthetic oligonucleotide
uagugacaguuuggccuuguug

SEQ ID NO: 5655 - RNA, 22 nt, Artificial Sequence
  Description of Artificial Sequence: Synthetic oligonucleotide
ucugcugcaaaaagcuugaguc

SEQ ID NO: 5656 - RNA, 22 nt, Artificial Sequence
  Description of Artificial Sequence: Synthetic oligonucleotide
cugcugcaaaaagcuugagucu

SEQ ID NO: 5657 - RNA, 22 nt, Artificial Sequence
  Description of Artificial Sequence: Synthetic oligonucleotide
uucugcugcaaaaagcuugagu

SEQ ID NO: 5658 - RNA, 22 nt, Artificial Sequence
  Description of Artificial Sequence: Synthetic oligonucleotide
guuuaguaaguggguaagcauc

SEQ ID NO: 5659 - RNA, 22 nt, Artificial Sequence
  Description of Artificial Sequence: Synthetic oligonucleotide
uguuuaguaaguggguaagcau

SEQ ID NO: 5660 - RNA, 22 nt, Artificial Sequence
  Description of Artificial Sequence: Synthetic oligonucleotide
auucucauaaacaaauccauaa

SEQ ID NO: 5661 - RNA, 22 nt, Artificial Sequence
  Description of Artificial Sequence: Synthetic oligonucleotide
ucuuccauauaggcagcucucc

SEQ ID NO: 5662 - RNA, 22 nt, Artificial Sequence
  Description of Artificial Sequence: Synthetic oligonucleotide
cucuuccauauaggcagcucuc

SEQ ID NO: 5663 - RNA, 22 nt, Artificial Sequence
  Description of Artificial Sequence: Synthetic oligonucleotide
uugcauggcugcaucacgguca

SEQ ID NO: 5664 - RNA, 22 nt, Artificial Sequence
  Description of Artificial Sequence: Synthetic oligonucleotide
guugcauggcugcaucacgguc

SEQ ID NO: 5665 - RNA, 22 nt, Artificial Sequence
  Description of Artificial Sequence: Synthetic oligonucleotide
cguugcauggcugcaucacggu

SEQ ID NO: 5666 - RNA, 22 nt, Artificial Sequence
  Description of Artificial Sequence: Synthetic oligonucleotide
guagccaauuuggucaucugga

SEQ ID NO: 5667 - RNA, 22 nt, Artificial Sequence
  Description of Artificial Sequence: Synthetic oligonucleotide
aguagccaauuuggucaucugg

SEQ ID NO: 5668 - RNA, 22 nt, Artificial Sequence
  Description of Artificial Sequence: Synthetic oligonucleotide
agccaauuuggucaucuggacu

SEQ ID NO: 5669 - RNA, 22 nt, Artificial Sequence
  Description of Artificial Sequence: Synthetic oligonucleotide
uagccaauuuggucaucuggac

SEQ ID NO: 5670 - RNA, 22 nt, Artificial Sequence
  Description of Artificial Sequence: Synthetic oligonucleotide
agugcacaaaaguuagcagcuu

SEQ ID NO: 5671 - RNA, 22 nt, Artificial Sequence
  Description of Artificial Sequence: Synthetic oligonucleotide
uaagugcacaaaaguuagcagc

SEQ ID NO: 5672 - RNA, 22 nt, Artificial Sequence
  Description of Artificial Sequence: Synthetic oligonucleotide
auaagugcacaaaaguuagcag

SEQ ID NO: 5673 - RNA, 22 nt, Artificial Sequence
  Description of Artificial Sequence: Synthetic oligonucleotide
cacaaaaguuagcagcuucacc

SEQ ID NO: 5674 - RNA, 22 nt, Artificial Sequence
  Description of Artificial Sequence: Synthetic oligonucleotide
gcacaaaaguuagcagcuucac

SEQ ID NO: 5675 - RNA, 22 nt, Artificial Sequence
  Description of Artificial Sequence: Synthetic oligonucleotide
ugcacaaaaguuagcagcuuca

SEQ ID NO: 5676 - RNA, 22 nt, Artificial Sequence
  Description of Artificial Sequence: Synthetic oligonucleotide
gugcacaaaaguuagcagcuuc

SEQ ID NO: 5677 - RNA, 22 nt, Artificial Sequence
  Description of Artificial Sequence: Synthetic oligonucleotide
uuucaaagguguacucuccuau

SEQ ID NO: 5678 - RNA, 22 nt, Artificial Sequence
  Description of Artificial Sequence: Synthetic oligonucleotide
cagcaucaccauagucaccuuu

SEQ ID NO: 5679 - RNA, 22 nt, Artificial Sequence
  Description of Artificial Sequence: Synthetic oligonucleotide
acagcaucaccauagucaccuu

SEQ ID NO: 5680 - RNA, 22 nt, Artificial Sequence
  Description of Artificial Sequence: Synthetic oligonucleotide
aacagcaucaccauagucaccu

SEQ ID NO: 5681 - RNA, 22 nt, Artificial Sequence
  Description of Artificial Sequence: Synthetic oligonucleotide
caacagcaucaccauagucacc

SEQ ID NO: 5682 - RNA, 22 nt, Artificial Sequence
  Description of Artificial Sequence: Synthetic oligonucleotide
acaacagcaucaccauagucac

SEQ ID NO: 5683 - RNA, 22 nt, Artificial Sequence
  Description of Artificial Sequence: Synthetic oligonucleotide
gaauucacuuugaauuuaucaa

SEQ ID NO: 5684 - RNA, 22 nt, Artificial Sequence
  Description of Artificial Sequence: Synthetic oligonucleotide
ugaauucacuuugaauuuauca

SEQ ID NO: 5685 - RNA, 22 nt, Artificial Sequence
  Description of Artificial Sequence: Synthetic oligonucleotide
uugaauucacuuugaauuuauc

SEQ ID NO: 5686 - RNA, 22 nt, Artificial Sequence
  Description of Artificial Sequence: Synthetic oligonucleotide
guugaauucacuuugaauuuau

SEQ ID NO: 5687 - RNA, 22 nt, Artificial Sequence
  Description of Artificial Sequence: Synthetic oligonucleotide
ucacuuugaauuuaucaaaaca

SEQ ID NO: 5688 - RNA, 22 nt, Artificial Sequence
  Description of Artificial Sequence: Synthetic oligonucleotide
uucacuuugaauuuaucaaaac

SEQ ID NO: 5689 - RNA, 22 nt, Artificial Sequence
  Description of Artificial Sequence: Synthetic oligonucleotide
auucacuuugaauuuaucaaaa

SEQ ID NO: 5690 - RNA, 22 nt, Artificial Sequence
  Description of Artificial Sequence: Synthetic oligonucleotide
aauucacuuugaauuuaucaaa

SEQ ID NO: 5691 - RNA, 22 nt, Artificial Sequence
  Description of Artificial Sequence: Synthetic oligonucleotide
uguugaauucacuuugaauuua

SEQ ID NO: 5692 - RNA, 22 nt, Artificial Sequence
  Description of Artificial Sequence: Synthetic oligonucleotide
auguugaauucacuuugaauuu

SEQ ID NO: 5693 - RNA, 22 nt, Artificial Sequence
  Description of Artificial Sequence: Synthetic oligonucleotide
uauuugugaaaaauuaaaacca

SEQ ID NO: 5694 - RNA, 22 nt, Artificial Sequence
  Description of Artificial Sequence: Synthetic oligonucleotide
auuugugaaaaauuaaaaccac

SEQ ID NO: 5695 - RNA, 22 nt, Artificial Sequence
  Description of Artificial Sequence: Synthetic oligonucleotide
aauauuugugaaaaauuaaaac

SEQ ID NO: 5696 - RNA, 22 nt, Artificial Sequence
  Description of Artificial Sequence: Synthetic oligonucleotide
ugguaauauuugugaaaaauua

SEQ ID NO: 5697 - RNA, 22 nt, Artificial Sequence
  Description of Artificial Sequence: Synthetic oligonucleotide
ucugguaauauuugugaaaaau

SEQ ID NO: 5698 - RNA, 22 nt, Artificial Sequence
  Description of Artificial Sequence: Synthetic oligonucleotide
cugguaauauuugugaaaaauu

SEQ ID NO: 5699 - RNA, 22 nt, Artificial Sequence
  Description of Artificial Sequence: Synthetic oligonucleotide
uuuguuaaaauuaccggguuug

SEQ ID NO: 5700 - RNA, 22 nt, Artificial Sequence
  Description of Artificial Sequence: Synthetic oligonucleotide
cuuuguuaaaauuaccggguuu

SEQ ID NO: 5701 - RNA, 22 nt, Artificial Sequence
  Description of Artificial Sequence: Synthetic oligonucleotide
uuaaaauuaccggguuugacag

SEQ ID NO: 5702 - RNA, 22 nt, Artificial Sequence
  Description of Artificial Sequence: Synthetic oligonucleotide
guuaaaauuaccggguuugaca

SEQ ID NO: 5703 - RNA, 22 nt, Artificial Sequence
  Description of Artificial Sequence: Synthetic oligonucleotide
uguuaaaauuaccggguuugac

SEQ ID NO: 5704 - RNA, 22 nt, Artificial Sequence
  Description of Artificial Sequence: Synthetic oligonucleotide
uuguuaaaauuaccggguuuga

SEQ ID NO: 5705 - RNA, 22 nt, Artificial Sequence
  Description of Artificial Sequence: Synthetic oligonucleotide
aauuaccggguuugacaguuug

SEQ ID NO: 5706 - RNA, 22 nt, Artificial Sequence
  Description of Artificial Sequence: Synthetic oligonucleotide
aaauuaccggguuugacaguuu

SEQ ID NO: 5707 - RNA, 22 nt, Artificial Sequence
  Description of Artificial Sequence: Synthetic oligonucleotide
aaaauuaccggguuugacaguu

SEQ ID NO: 5708 - RNA, 22 nt, Artificial Sequence
  Description of Artificial Sequence: Synthetic oligonucleotide
uaaaauuaccggguuugacagu

SEQ ID NO: 5709 - RNA, 22 nt, Artificial Sequence
  Description of Artificial Sequence: Synthetic oligonucleotide
caagaauguucuguuaucuuua

SEQ ID NO: 5710 - RNA, 22 nt, Artificial Sequence
  Description of Artificial Sequence: Synthetic oligonucleotide
gcacacauaucuaaaacggcaa

SEQ ID NO: 5711 - RNA, 22 nt, Artificial Sequence
  Description of Artificial Sequence: Synthetic oligonucleotide
cagauggugaaccauuguaaca

SEQ ID NO: 5712 - RNA, 22 nt, Artificial Sequence
  Description of Artificial Sequence: Synthetic oligonucleotide
gugccaagcucgucgccuaagu

SEQ ID NO: 5713 - RNA, 22 nt, Artificial Sequence
  Description of Artificial Sequence: Synthetic oligonucleotide
agugccaagcucgucgccuaag

SEQ ID NO: 5714 - RNA, 22 nt, Artificial Sequence
  Description of Artificial Sequence: Synthetic oligonucleotide
ugccaagcucgucgccuaaguc

SEQ ID NO: 5715 - RNA, 22 nt, Artificial Sequence
  Description of Artificial Sequence: Synthetic oligonucleotide
cgcaaacccguuuaaaaacgau

SEQ ID NO: 5716 - RNA, 22 nt, Artificial Sequence
  Description of Artificial Sequence: Synthetic oligonucleotide
uaugucuacagcacccugcaug

SEQ ID NO: 5717 - RNA, 22 nt, Artificial Sequence
  Description of Artificial Sequence: Synthetic oligonucleotide
augucuacagcacccugcaugg

SEQ ID NO: 5718 - RNA, 22 nt, Artificial Sequence
  Description of Artificial Sequence: Synthetic oligonucleotide
ucuacagcacccugcauggaaa

SEQ ID NO: 5719 - RNA, 22 nt, Artificial Sequence
  Description of Artificial Sequence: Synthetic oligonucleotide
cuacagcacccugcauggaaag

SEQ ID NO: 5720 - RNA, 22 nt, Artificial Sequence
  Description of Artificial Sequence: Synthetic oligonucleotide
ugucuacagcacccugcaugga

SEQ ID NO: 5721 - RNA, 22 nt, Artificial Sequence
  Description of Artificial Sequence: Synthetic oligonucleotide
gucuacagcacccugcauggaa

SEQ ID NO: 5722 - RNA, 22 nt, Artificial Sequence
  Description of Artificial Sequence: Synthetic oligonucleotide
cagcacccugcauggaaagcaa

SEQ ID NO: 5723 - RNA, 22 nt, Artificial Sequence
  Description of Artificial Sequence: Synthetic oligonucleotide
agcacccugcauggaaagcaaa

SEQ ID NO: 5724 - RNA, 22 nt, Artificial Sequence
  Description of Artificial Sequence: Synthetic oligonucleotide
uacagcacccugcauggaaagc

SEQ ID NO: 5725 - RNA, 22 nt, Artificial Sequence
  Description of Artificial Sequence: Synthetic oligonucleotide
acagcacccugcauggaaagca

SEQ ID NO: 5726 - RNA, 22 nt, Artificial Sequence
  Description of Artificial Sequence: Synthetic oligonucleotide
cgccacacaugaccauuucacu

SEQ ID NO: 5727 - RNA, 22 nt, Artificial Sequence
  Description of Artificial Sequence: Synthetic oligonucleotide
uugaaucugaggguccaccaaa

SEQ ID NO: 5728 - RNA, 22 nt, Artificial Sequence
  Description of Artificial Sequence: Synthetic oligonucleotide
aaaucaucugguaauuuauaau

SEQ ID NO: 5729 - RNA, 22 nt, Artificial Sequence
  Description of Artificial Sequence: Synthetic oligonucleotide
gcagguccuugaugucacagcg

SEQ ID NO: 5730 - RNA, 22 nt, Artificial Sequence
  Description of Artificial Sequence: Synthetic oligonucleotide
ggcagguccuugaugucacagc

SEQ ID NO: 5731 - RNA, 22 nt, Artificial Sequence
  Description of Artificial Sequence: Synthetic oligonucleotide
uaagcauagugaaaagcauugu

SEQ ID NO: 5732 - RNA, 22 nt, Artificial Sequence
  Description of Artificial Sequence: Synthetic oligonucleotide
cuaagcauagugaaaagcauug

SEQ ID NO: 5733 - RNA, 22 nt, Artificial Sequence
  Description of Artificial Sequence: Synthetic oligonucleotide
gaaaaagaaguacgcuauuaac

SEQ ID NO: 5734 - RNA, 22 nt, Artificial Sequence
  Description of Artificial Sequence: Synthetic oligonucleotide
aaaaagaaguacgcuauuaacu

SEQ ID NO: 5735 - RNA, 22 nt, Artificial Sequence
  Description of Artificial Sequence: Synthetic oligonucleotide
aagaaaaagaaguacgcuauua

SEQ ID NO: 5736 - RNA, 22 nt, Artificial Sequence
  Description of Artificial Sequence: Synthetic oligonucleotide
agaaaaagaaguacgcuauuaa

SEQ ID NO: 5737 - RNA, 22 nt, Artificial Sequence
  Description of Artificial Sequence: Synthetic oligonucleotide
gcaagaaaaagaaguacgcuau

SEQ ID NO: 5738 - RNA, 22 nt, Artificial Sequence
  Description of Artificial Sequence: Synthetic oligonucleotide
caagaaaaagaaguacgcuauu

SEQ ID NO: 5739 - RNA, 22 nt, Artificial Sequence
  Description of Artificial Sequence: Synthetic oligonucleotide
aagcaagaaaaagaaguacgcu

SEQ ID NO: 5740 - RNA, 22 nt, Artificial Sequence
  Description of Artificial Sequence: Synthetic oligonucleotide
agcaagaaaaagaaguacgcua

SEQ ID NO: 5741 - RNA, 22 nt, Artificial Sequence
  Description of Artificial Sequence: Synthetic oligonucleotide
gaaagcaagaaaaagaaguacg

SEQ ID NO: 5742 - RNA, 22 nt, Artificial Sequence
  Description of Artificial Sequence: Synthetic oligonucleotide
aaagcaagaaaaagaaguacgc

SEQ ID NO: 5743 - RNA, 22 nt, Artificial Sequence
  Description of Artificial Sequence: Synthetic oligonucleotide
agcuguaccuggugcaacuccu

SEQ ID NO: 5744 - RNA, 22 nt, Artificial Sequence
  Description of Artificial Sequence: Synthetic oligonucleotide
gaggcuugacugccgccucugc

SEQ ID NO: 5745 - RNA, 22 nt, Artificial Sequence
  Description of Artificial Sequence: Synthetic oligonucleotide
agaggcuugacugccgccucug

SEQ ID NO: 5746 - RNA, 22 nt, Artificial Sequence
  Description of Artificial Sequence: Synthetic oligonucleotide
ggcuugacugccgccucugcuc

SEQ ID NO: 5747 - RNA, 22 nt, Artificial Sequence
  Description of Artificial Sequence: Synthetic oligonucleotide
aggcuugacugccgccucugcu

SEQ ID NO: 5748 - RNA, 22 nt, Artificial Sequence
  Description of Artificial Sequence: Synthetic oligonucleotide
cuugacugccgccucugcuccc

SEQ ID NO: 5749 - RNA, 22 nt, Artificial Sequence
  Description of Artificial Sequence: Synthetic oligonucleotide
aagaggcuugacugccgccucu

SEQ ID NO: 5750 - RNA, 22 nt, Artificial Sequence
  Description of Artificial Sequence: Synthetic oligonucleotide
gaagaggcuugacugccgccuc

SEQ ID NO: 5751 - RNA, 22 nt, Artificial Sequence
  Description of Artificial Sequence: Synthetic oligonucleotide
caagauuagcagaagcucugau

SEQ ID NO: 5752 - RNA, 22 nt, Artificial Sequence
  Description of Artificial Sequence: Synthetic oligonucleotide
aagauuagcagaagcucugauu

SEQ ID NO: 5753 - RNA, 22 nt, Artificial Sequence
  Description of Artificial Sequence: Synthetic oligonucleotide
uccccaaaauuuccuuggguuu

SEQ ID NO: 5754 - RNA, 22 nt, Artificial Sequence
  Description of Artificial Sequence: Synthetic oligonucleotide
agauuagcagaagcucugauuu

SEQ ID NO: 5755 - RNA, 22 nt, Artificial Sequence
  Description of Artificial Sequence: Synthetic oligonucleotide
gauuagcagaagcucugauuuc

SEQ ID NO: 5756 - RNA, 22 nt, Artificial Sequence
  Description of Artificial Sequence: Synthetic oligonucleotide
auuuccuuggguuuguucugga

SEQ ID NO: 5757 - RNA, 22 nt, Artificial Sequence
  Description of Artificial Sequence: Synthetic oligonucleotide
aauuuccuuggguuuguucugg

SEQ ID NO: 5758 - RNA, 22 nt, Artificial Sequence
  Description of Artificial Sequence: Synthetic oligonucleotide
aaauuuccuuggguuuguucug

SEQ ID NO: 5759 - RNA, 22 nt, Artificial Sequence
  Description of Artificial Sequence: Synthetic oligonucleotide
aaaauuuccuuggguuuguucu

SEQ ID NO: 5760 - RNA, 22 nt, Artificial Sequence
  Description of Artificial Sequence: Synthetic oligonucleotide
caaaauuuccuuggguuuguuc

SEQ ID NO: 5761 - RNA, 22 nt, Artificial Sequence
  Description of Artificial Sequence: Synthetic oligonucleotide
ccaaaauuuccuuggguuuguu

SEQ ID NO: 5762 - RNA, 22 nt, Artificial Sequence
  Description of Artificial Sequence: Synthetic oligonucleotide
cccaaaauuuccuuggguuugu

SEQ ID NO: 5763 - RNA, 22 nt, Artificial Sequence
  Description of Artificial Sequence: Synthetic oligonucleotide
ccccaaaauuuccuuggguuug

SEQ ID NO: 5764 - RNA, 22 nt, Artificial Sequence
  Description of Artificial Sequence: Synthetic oligonucleotide
ucauaagucuacacacugaauu

SEQ ID NO: 5765 - RNA, 22 nt, Artificial Sequence
  Description of Artificial Sequence: Synthetic oligonucleotide
acuuaguuucuuccagaguugu

SEQ ID NO: 5766 - RNA, 22 nt, Artificial Sequence
  Description of Artificial Sequence: Synthetic oligonucleotide
aacuuaguuucuuccagaguug

SEQ ID NO: 5767 - RNA, 22 nt, Artificial Sequence
  Description of Artificial Sequence: Synthetic oligonucleotide
agcccugugaugaaucaacagu

SEQ ID NO: 5768 - RNA, 22 nt, Artificial Sequence
  Description of Artificial Sequence: Synthetic oligonucleotide
gcacaagacaucugucguagug

SEQ ID NO: 5769 - RNA, 22 nt, Artificial Sequence
  Description of Artificial Sequence: Synthetic oligonucleotide
augaaagacaucagcauacucc

SEQ ID NO: 5770 - RNA, 22 nt, Artificial Sequence
  Description of Artificial Sequence: Synthetic oligonucleotide
aaugaaagacaucagcauacuc

SEQ ID NO: 5771 - RNA, 22 nt, Artificial Sequence
  Description of Artificial Sequence: Synthetic oligonucleotide
aaaugaaagacaucagcauacu

SEQ ID NO: 5772 - RNA, 22 nt, Artificial Sequence
  Description of Artificial Sequence: Synthetic oligonucleotide
caaaugaaagacaucagcauac

SEQ ID NO: 5773 - RNA, 22 nt, Artificial Sequence
  Description of Artificial Sequence: Synthetic oligonucleotide
uacaaaugaaagacaucagcau

SEQ ID NO: 5774 - RNA, 22 nt, Artificial Sequence
  Description of Artificial Sequence: Synthetic oligonucleotide
accuauuacuagguuccauugu

SEQ ID NO: 5775 - RNA, 22 nt, Artificial Sequence
  Description of Artificial Sequence: Synthetic oligonucleotide
cuauuacuagguuccauuguuc

SEQ ID NO: 5776 - RNA, 22 nt, Artificial Sequence
  Description of Artificial Sequence: Synthetic oligonucleotide
ccuauuacuagguuccauuguu

SEQ ID NO: 5777 - RNA, 22 nt, Artificial Sequence
  Description of Artificial Sequence: Synthetic oligonucleotide
ggaaaccuauuacuagguucca

SEQ ID NO: 5778 - RNA, 22 nt, Artificial Sequence
  Description of Artificial Sequence: Synthetic oligonucleotide
aggaaaccuauuacuagguucc

SEQ ID NO: 5779 - RNA, 22 nt, Artificial Sequence
  Description of Artificial Sequence: Synthetic oligonucleotide
aaaccuauuacuagguuccauu

SEQ ID NO: 5780 - RNA, 22 nt, Artificial Sequence
  Description of Artificial Sequence: Synthetic oligonucleotide
uaggaaaccuauuacuagguuc

SEQ ID NO: 5781 - RNA, 22 nt, Artificial Sequence
  Description of Artificial Sequence: Synthetic oligonucleotide
auaggaaaccuauuacuagguu

SEQ ID NO: 5782 - RNA, 22 nt, Artificial Sequence
  Description of Artificial Sequence: Synthetic oligonucleotide
auauagugaaccgccacacaug

SEQ ID NO: 5783 - RNA, 22 nt, Artificial Sequence
  Description of Artificial Sequence: Synthetic oligonucleotide
guuuguaaucaguuccuugucu

SEQ ID NO: 5784 - RNA, 22 nt, Artificial Sequence
  Description of Artificial Sequence: Synthetic oligonucleotide
uuuguaaucaguuccuugucug

SEQ ID NO: 5785 - RNA, 22 nt, Artificial Sequence
  Description of Artificial Sequence: Synthetic oligonucleotide
uuguaaucaguuccuugucuga

SEQ ID NO: 5786 - RNA, 22 nt, Artificial Sequence
  Description of Artificial Sequence: Synthetic oligonucleotide
uguaaucaguuccuugucugau

SEQ ID NO: 5787 - RNA, 22 nt, Artificial Sequence
  Description of Artificial Sequence: Synthetic oligonucleotide
caauguuuguaaucaguuccuu

SEQ ID NO: 5788 - RNA, 22 nt, Artificial Sequence
  Description of Artificial Sequence: Synthetic oligonucleotide
aauguuuguaaucaguuccuug

SEQ ID NO: 5789 - RNA, 22 nt, Artificial Sequence
  Description of Artificial Sequence: Synthetic oligonucleotide
auguuuguaaucaguuccuugu

SEQ ID NO: 5790 - RNA, 22 nt, Artificial Sequence
  Description of Artificial Sequence: Synthetic oligonucleotide
uguuuguaaucaguuccuuguc

SEQ ID NO: 5791 - RNA, 22 nt, Artificial Sequence
  Description of Artificial Sequence: Synthetic oligonucleotide
ccaauguuuguaaucaguuccu

SEQ ID NO: 5792 - RNA, 22 nt, Artificial Sequence
  Description of Artificial Sequence: Synthetic oligonucleotide
uguuaaaaccaacacuaccaca

SEQ ID NO: 5793 - RNA, 22 nt, Artificial Sequence
  Description of Artificial Sequence: Synthetic oligonucleotide
guuaaaaccaacacuaccacau

SEQ ID NO: 5794 - RNA, 22 nt, Artificial Sequence
  Description of Artificial Sequence: Synthetic oligonucleotide
uuaaaaccaacacuaccacaug

SEQ ID NO: 5795 - RNA, 22 nt, Artificial Sequence
  Description of Artificial Sequence: Synthetic oligonucleotide
uaaaaccaacacuaccacauga

SEQ ID NO: 5796 - RNA, 22 nt, Artificial Sequence
  Description of Artificial Sequence: Synthetic oligonucleotide
ucuauguuaaaaccaacacuac

SEQ ID NO: 5797 - RNA, 22 nt, Artificial Sequence
  Description of Artificial Sequence: Synthetic oligonucleotide
cuauguuaaaaccaacacuacc

SEQ ID NO: 5798 - RNA, 22 nt, Artificial Sequence
  Description of Artificial Sequence: Synthetic oligonucleotide
uauguuaaaaccaacacuacca

SEQ ID NO: 5799 - RNA, 22 nt, Artificial Sequence
  Description of Artificial Sequence: Synthetic oligonucleotide
auguuaaaaccaacacuaccac

SEQ ID NO: 5800 - RNA, 22 nt, Artificial Sequence
  Description of Artificial Sequence: Synthetic oligonucleotide
aaucuauguuaaaaccaacacu

SEQ ID NO: 5801 - RNA, 22 nt, Artificial Sequence
  Description of Artificial Sequence: Synthetic oligonucleotide
aucuauguuaaaaccaacacua

SEQ ID NO: 5802 - RNA, 22 nt, Artificial Sequence
  Description of Artificial Sequence: Synthetic oligonucleotide
accuuucggucacacccggacg

SEQ ID NO: 5803 - RNA, 22 nt, Artificial Sequence
  Description of Artificial Sequence: Synthetic oligonucleotide
uaccuuucggucacacccggac

SEQ ID NO: 5804 - RNA, 22 nt, Artificial Sequence
  Description of Artificial Sequence: Synthetic oligonucleotide
cggucacacccggacgaaaccu

SEQ ID NO: 5805 - RNA, 22 nt, Artificial Sequence
  Description of Artificial Sequence: Synthetic oligonucleotide
ucggucacacccggacgaaacc

SEQ ID NO: 5806 - RNA, 22 nt, Artificial Sequence
  Description of Artificial Sequence: Synthetic oligonucleotide
gucacacccggacgaaaccuag

SEQ ID NO: 5807 - RNA, 22 nt, Artificial Sequence
  Description of Artificial Sequence: Synthetic oligonucleotide
ggucacacccggacgaaaccua

SEQ ID NO: 5808 - RNA, 22 nt, Artificial Sequence
  Description of Artificial Sequence: Synthetic oligonucleotide
cuuucggucacacccggacgaa

SEQ ID NO: 5809 - RNA, 22 nt, Artificial Sequence
  Description of Artificial Sequence: Synthetic oligonucleotide
ccuuucggucacacccggacga

SEQ ID NO: 5810 - RNA, 22 nt, Artificial Sequence
  Description of Artificial Sequence: Synthetic oligonucleotide
uucggucacacccggacgaaac

SEQ ID NO: 5811 - RNA, 22 nt, Artificial Sequence
  Description of Artificial Sequence: Synthetic oligonucleotide
uuucggucacacccggacgaaa

SEQ ID NO: 5812 - RNA, 22 nt, Artificial Sequence
  Description of Artificial Sequence: Synthetic oligonucleotide
caugaaagauguaauucucugu

SEQ ID NO: 5813 - RNA, 22 nt, Artificial Sequence
  Description of Artificial Sequence: Synthetic oligonucleotide
ccaugaaagauguaauucucug

SEQ ID NO: 5814 - RNA, 22 nt, Artificial Sequence
  Description of Artificial Sequence: Synthetic oligonucleotide
cccaugaaagauguaauucucu

SEQ ID NO: 5815 - RNA, 22 nt, Artificial Sequence
  Description of Artificial Sequence: Synthetic oligonucleotide
ucccaugaaagauguaauucuc

SEQ ID NO: 5816 - RNA, 22 nt, Artificial Sequence
  Description of Artificial Sequence: Synthetic oligonucleotide
uaggucauguccuuagguaugc

SEQ ID NO: 5817 - RNA, 22 nt, Artificial Sequence
  Description of Artificial Sequence: Synthetic oligonucleotide
aggucauguccuuagguaugcc

SEQ ID NO: 5818 - RNA, 22 nt, Artificial Sequence
  Description of Artificial Sequence: Synthetic oligonucleotide
uacauuuaucuauaggcaaaua

SEQ ID NO: 5819 - RNA, 22 nt, Artificial Sequence
  Description of Artificial Sequence: Synthetic oligonucleotide
ucuccaauuaaugugacuccau

SEQ ID NO: 5820 - RNA, 22 nt, Artificial Sequence
  Description of Artificial Sequence: Synthetic oligonucleotide
cuccaauuaaugugacuccauu

SEQ ID NO: 5821 - RNA, 22 nt, Artificial Sequence
  Description of Artificial Sequence: Synthetic oligonucleotide
cuucuccaauuaaugugacucc

SEQ ID NO: 5822 - RNA, 22 nt, Artificial Sequence
  Description of Artificial Sequence: Synthetic oligonucleotide
uucuccaauuaaugugacucca

SEQ ID NO: 5823 - RNA, 22 nt, Artificial Sequence
  Description of Artificial Sequence: Synthetic oligonucleotide
uccaauuaaugugacuccauua

SEQ ID NO: 5824 - RNA, 22 nt, Artificial Sequence
  Description of Artificial Sequence: Synthetic oligonucleotide
ccaauuaaugugacuccauuaa

SEQ ID NO: 5825 - RNA, 22 nt, Artificial Sequence
  Description of Artificial Sequence: Synthetic oligonucleotide
gcuucuccaauuaaugugacuc

SEQ ID NO: 5826 - RNA, 22 nt, Artificial Sequence
  Description of Artificial Sequence: Synthetic oligonucleotide
caaaguacuuaucaacaacuuc

SEQ ID NO: 5827 - RNA, 22 nt, Artificial Sequence
  Description of Artificial Sequence: Synthetic oligonucleotide
aguacuuaucaacaacuucaac

SEQ ID NO: 5828 - RNA, 22 nt, Artificial Sequence
  Description of Artificial Sequence: Synthetic oligonucleotide
uacuuaucaacaacuucaacua

SEQ ID NO: 5829 - RNA, 22 nt, Artificial Sequence
  Description of Artificial Sequence: Synthetic oligonucleotide
guacuuaucaacaacuucaacu

SEQ ID NO: 5830 - RNA, 22 nt, Artificial Sequence
  Description of Artificial Sequence: Synthetic oligonucleotide
acuuaucaacaacuucaacuac

SEQ ID NO: 5831 - RNA, 22 nt, Artificial Sequence
  Description of Artificial Sequence: Synthetic oligonucleotide
uaucaacaacuucaacuacaaa

SEQ ID NO: 5832 - RNA, 22 nt, Artificial Sequence
  Description of Artificial Sequence: Synthetic oligonucleotide
uuaucaacaacuucaacuacaa

SEQ ID NO: 5833 - RNA, 22 nt, Artificial Sequence
  Description of Artificial Sequence: Synthetic oligonucleotide
gcagcauuaccauccugagcaa

SEQ ID NO: 5834 - RNA, 22 nt, Artificial Sequence
  Description of Artificial Sequence: Synthetic oligonucleotide
agcagcauuaccauccugagca

SEQ ID NO: 5835 - RNA, 22 nt, Artificial Sequence
  Description of Artificial Sequence: Synthetic oligonucleotide
uagcagcauuaccauccugagc

SEQ ID NO: 5836 - RNA, 22 nt, Artificial Sequence
  Description of Artificial Sequence: Synthetic oligonucleotide
auagcagcauuaccauccugag

SEQ ID NO: 5837 - RNA, 22 nt, Artificial Sequence
  Description of Artificial Sequence: Synthetic oligonucleotide
agcauuaccauccugagcaaag

SEQ ID NO: 5838 - RNA, 22 nt, Artificial Sequence
  Description of Artificial Sequence: Synthetic oligonucleotide
cagcauuaccauccugagcaaa

SEQ ID NO: 5839 - RNA, 22 nt, Artificial Sequence
  Description of Artificial Sequence: Synthetic oligonucleotide
gcauugcaaacauacggauuaa

SEQ ID NO: 5840 - RNA, 22 nt, Artificial Sequence
  Description of Artificial Sequence: Synthetic oligonucleotide
cauugcaaacauacggauuaac

SEQ ID NO: 5841 - RNA, 22 nt, Artificial Sequence
  Description of Artificial Sequence: Synthetic oligonucleotide
auugcaaacauacggauuaaca

SEQ ID NO: 5842 - RNA, 22 nt, Artificial Sequence
  Description of Artificial Sequence: Synthetic oligonucleotide
uugcaaacauacggauuaacag

SEQ ID NO: 5843 - RNA, 22 nt, Artificial Sequence
  Description of Artificial Sequence: Synthetic oligonucleotide
ugcaaacauacggauuaacaga

SEQ ID NO: 5844 - RNA, 22 nt, Artificial Sequence
  Description of Artificial Sequence: Synthetic oligonucleotide
gcaaacauacggauuaacagac

SEQ ID NO: 5845 - RNA, 22 nt, Artificial Sequence
  Description of Artificial Sequence: Synthetic oligonucleotide
caaccuggagcauugcaaacau

SEQ ID NO: 5846 - RNA, 22 nt, Artificial Sequence
  Description of Artificial Sequence: Synthetic oligonucleotide
caugucauaauacgcaucaccc

SEQ ID NO: 5847 - RNA, 22 nt, Artificial Sequence
  Description of Artificial Sequence: Synthetic oligonucleotide
ccaugucauaauacgcaucacc

SEQ ID NO: 5848 - RNA, 22 nt, Artificial Sequence
  Description of Artificial Sequence: Synthetic oligonucleotide
ucacaaccuggagcauugcaaa

SEQ ID NO: 5849 - RNA, 22 nt, Artificial Sequence
  Description of Artificial Sequence: Synthetic oligonucleotide
accuauaagccauuugcauagc

SEQ ID NO: 5850 - RNA, 22 nt, Artificial Sequence
  Description of Artificial Sequence: Synthetic oligonucleotide
aaccuauaagccauuugcauag

SEQ ID NO: 5851 - RNA, 22 nt, Artificial Sequence
  Description of Artificial Sequence: Synthetic oligonucleotide
cuauaagccauuugcauagcaa

SEQ ID NO: 5852 - RNA, 22 nt, Artificial Sequence
  Description of Artificial Sequence: Synthetic oligonucleotide
ccuauaagccauuugcauagca

SEQ ID NO: 5853 - RNA, 22 nt, Artificial Sequence
  Description of Artificial Sequence: Synthetic oligonucleotide
gaacguuugaugaacacauagg

SEQ ID NO: 5854 - RNA, 22 nt, Artificial Sequence
  Description of Artificial Sequence: Synthetic oligonucleotide
aacguuugaugaacacauaggg

SEQ ID NO: 5855 - RNA, 22 nt, Artificial Sequence
  Description of Artificial Sequence: Synthetic oligonucleotide
acguuugaugaacacauagggc

SEQ ID NO: 5856 - RNA, 22 nt, Artificial Sequence
  Description of Artificial Sequence: Synthetic oligonucleotide
cguuugaugaacacauagggcu

SEQ ID NO: 5857 - RNA, 22 nt, Artificial Sequence
  Description of Artificial Sequence: Synthetic oligonucleotide
gcaucaacagcggcaugagagc

SEQ ID NO: 5858 - RNA, 22 nt, Artificial Sequence
  Description of Artificial Sequence: Synthetic oligonucleotide
caucaacagcggcaugagagca

SEQ ID NO: 5859 - RNA, 22 nt, Artificial Sequence
  Description of Artificial Sequence: Synthetic oligonucleotide
gcuucuucgcgggugauaaaca

SEQ ID NO: 5860 - RNA, 22 nt, Artificial Sequence
  Description of Artificial Sequence: Synthetic oligonucleotide
agcuucuucgcgggugauaaac

SEQ ID NO: 5861 - RNA, 22 nt, Artificial Sequence
  Description of Artificial Sequence: Synthetic oligonucleotide
gcgggugauaaacauguuaggg

SEQ ID NO: 5862 - RNA, 22 nt, Artificial Sequence
  Description of Artificial Sequence: Synthetic oligonucleotide
cgcgggugauaaacauguuagg

SEQ ID NO: 5863 - RNA, 22 nt, Artificial Sequence
  Description of Artificial Sequence: Synthetic oligonucleotide
ucgcgggugauaaacauguuag

SEQ ID NO: 5864 - RNA, 22 nt, Artificial Sequence
  Description of Artificial Sequence: Synthetic oligonucleotide
uucgcgggugauaaacauguua

SEQ ID NO: 5865 - RNA, 22 nt, Artificial Sequence
  Description of Artificial Sequence: Synthetic oligonucleotide
cuucgcgggugauaaacauguu

SEQ ID NO: 5866 - RNA, 22 nt, Artificial Sequence
  Description of Artificial Sequence: Synthetic oligonucleotide
ucuucgcgggugauaaacaugu

SEQ ID NO: 5867 - RNA, 22 nt, Artificial Sequence
  Description of Artificial Sequence: Synthetic oligonucleotide
uucuucgcgggugauaaacaug

SEQ ID NO: 5868 - RNA, 22 nt, Artificial Sequence
  Description of Artificial Sequence: Synthetic oligonucleotide
cuucuucgcgggugauaaacau

SEQ ID NO: 5869 - RNA, 22 nt, Artificial Sequence
  Description of Artificial Sequence: Synthetic oligonucleotide
gcaacacccgguugccacgcuu

SEQ ID NO: 5870 - RNA, 22 nt, Artificial Sequence
  Description of Artificial Sequence: Synthetic oligonucleotide
caacacccgguugccacgcuug

SEQ ID NO: 5871 - RNA, 22 nt, Artificial Sequence
  Description of Artificial Sequence: Synthetic oligonucleotide
gcaagagaagguaacaaaaaca

SEQ ID NO: 5872 - RNA, 22 nt, Artificial Sequence
  Description of Artificial Sequence: Synthetic oligonucleotide
caagagaagguaacaaaaacaa

SEQ ID NO: 5873 - RNA, 22 nt, Artificial Sequence
  Description of Artificial Sequence: Synthetic oligonucleotide
cauucugugaauuauaagguga

SEQ ID NO: 5874 - RNA, 22 nt, Artificial Sequence
  Description of Artificial Sequence: Synthetic oligonucleotide
gcaauuucaugcucauguucac

SEQ ID NO: 5875 - RNA, 22 nt, Artificial Sequence
  Description of Artificial Sequence: Synthetic oligonucleotide
caauuucaugcucauguucacg

SEQ ID NO: 5876 - RNA, 22 nt, Artificial Sequence
  Description of Artificial Sequence: Synthetic oligonucleotide
aauuucaugcucauguucacgg

SEQ ID NO: 5877 - RNA, 22 nt, Artificial Sequence
  Description of Artificial Sequence: Synthetic oligonucleotide
auuucaugcucauguucacggc

SEQ ID NO: 5878 - RNA, 22 nt, Artificial Sequence
  Description of Artificial Sequence: Synthetic oligonucleotide
accaagcaauuucaugcucaug

SEQ ID NO: 5879 - RNA, 22 nt, Artificial Sequence
  Description of Artificial Sequence: Synthetic oligonucleotide
uugcagcaguacgcacacaauc

SEQ ID NO: 5880 - RNA, 22 nt, Artificial Sequence
  Description of Artificial Sequence: Synthetic oligonucleotide
acaauauugcagcaguacgcac

SEQ ID NO: 5881 - RNA, 22 nt, Artificial Sequence
  Description of Artificial Sequence: Synthetic oligonucleotide
gaaaaacagcaagaagugcaac

SEQ ID NO: 5882 - RNA, 22 nt, Artificial Sequence
  Description of Artificial Sequence: Synthetic oligonucleotide
ccacacccaaauuauugaguau

SEQ ID NO: 5883 - RNA, 22 nt, Artificial Sequence
  Description of Artificial Sequence: Synthetic oligonucleotide
acacccaaauuauugaguauuu

SEQ ID NO: 5884 - RNA, 22 nt, Artificial Sequence
  Description of Artificial Sequence: Synthetic oligonucleotide
uccacacccaaauuauugagua

SEQ ID NO: 5885 - RNA, 22 nt, Artificial Sequence
  Description of Artificial Sequence: Synthetic oligonucleotide
aguagcuccucuaguggcggcu

SEQ ID NO: 5886 - RNA, 22 nt, Artificial Sequence
  Description of Artificial Sequence: Synthetic oligonucleotide
guagcuccucuaguggcggcua

SEQ ID NO: 5887 - RNA, 22 nt, Artificial Sequence
  Description of Artificial Sequence: Synthetic oligonucleotide
uagcuccucuaguggcggcuau

SEQ ID NO: 5888 - RNA, 22 nt, Artificial Sequence
  Description of Artificial Sequence: Synthetic oligonucleotide
agcuccucuaguggcggcuauu

SEQ ID NO: 5889 - RNA, 22 nt, Artificial Sequence
  Description of Artificial Sequence: Synthetic oligonucleotide
gcuccucuaguggcggcuauug

SEQ ID NO: 5890 - RNA, 22 nt, Artificial Sequence
  Description of Artificial Sequence: Synthetic oligonucleotide
cuccucuaguggcggcuauuga

SEQ ID NO: 5891 - RNA, 22 nt, Artificial Sequence
  Description of Artificial Sequence: Synthetic oligonucleotide
uccucuaguggcggcuauugau

SEQ ID NO: 5892 - RNA, 22 nt, Artificial Sequence
  Description of Artificial Sequence: Synthetic oligonucleotide
ccucuaguggcggcuauugauu

SEQ ID NO: 5893 - RNA, 22 nt, Artificial Sequence
  Description of Artificial Sequence: Synthetic oligonucleotide
acaguagcuccucuaguggcgg

SEQ ID NO: 5894 - RNA, 22 nt, Artificial Sequence
  Description of Artificial Sequence: Synthetic oligonucleotide
caguagcuccucuaguggcggc

SEQ ID NO: 5895 - RNA, 22 nt, Artificial Sequence
  Description of Artificial Sequence: Synthetic oligonucleotide
ggucauuagcacaaguuguagg

SEQ ID NO: 5896 - RNA, 22 nt, Artificial Sequence
  Description of Artificial Sequence: Synthetic oligonucleotide
gucauuagcacaaguuguaggu

SEQ ID NO: 5897 - RNA, 22 nt, Artificial Sequence
  Description of Artificial Sequence: Synthetic oligonucleotide
gggucauuagcacaaguuguag

SEQ ID NO: 5898 - RNA, 22 nt, Artificial Sequence
  Description of Artificial Sequence: Synthetic oligonucleotide
auuagcacaaguuguagguauu

SEQ ID NO: 5899 - RNA, 22 nt, Artificial Sequence
  Description of Artificial Sequence: Synthetic oligonucleotide
uuagcacaaguuguagguauuu

SEQ ID NO: 5900 - RNA, 22 nt, Artificial Sequence
  Description of Artificial Sequence: Synthetic oligonucleotide
ucauuagcacaaguuguaggua

SEQ ID NO: 5901 - RNA, 22 nt, Artificial Sequence
  Description of Artificial Sequence: Synthetic oligonucleotide
cauuagcacaaguuguagguau

SEQ ID NO: 5902 - RNA, 22 nt, Artificial Sequence
  Description of Artificial Sequence: Synthetic oligonucleotide
cucuuaccaguaccaggugguc

SEQ ID NO: 5903 - RNA, 22 nt, Artificial Sequence
  Description of Artificial Sequence: Synthetic oligonucleotide
acucuuaccaguaccagguggu

SEQ ID NO: 5904 - RNA, 22 nt, Artificial Sequence
  Description of Artificial Sequence: Synthetic oligonucleotide
aaaugacucuuaccaguaccag

SEQ ID NO: 5905 - RNA, 22 nt, Artificial Sequence
  Description of Artificial Sequence: Synthetic oligonucleotide
aaaaugacucuuaccaguacca

SEQ ID NO: 5906 - RNA, 22 nt, Artificial Sequence
  Description of Artificial Sequence: Synthetic oligonucleotide
augacucuuaccaguaccaggu

SEQ ID NO: 5907 - RNA, 22 nt, Artificial Sequence
  Description of Artificial Sequence: Synthetic oligonucleotide
aaugacucuuaccaguaccagg

SEQ ID NO: 5908 - RNA, 22 nt, Artificial Sequence
  Description of Artificial Sequence: Synthetic oligonucleotide
accguucaaucauaaguguacc

SEQ ID NO: 5909 - RNA, 22 nt, Artificial Sequence
  Description of Artificial Sequence: Synthetic oligonucleotide
aucauaaguguaccaucuguuu

SEQ ID NO: 5910 - RNA, 22 nt, Artificial Sequence
  Description of Artificial Sequence: Synthetic oligonucleotide
aaucauaaguguaccaucuguu

SEQ ID NO: 5911 - RNA, 22 nt, Artificial Sequence
  Description of Artificial Sequence: Synthetic oligonucleotide
caaucauaaguguaccaucugu

SEQ ID NO: 5912 - RNA, 22 nt, Artificial Sequence
  Description of Artificial Sequence: Synthetic oligonucleotide
ucaaucauaaguguaccaucug

SEQ ID NO: 5913 - RNA, 22 nt, Artificial Sequence
  Description of Artificial Sequence: Synthetic oligonucleotide
uucaaucauaaguguaccaucu

SEQ ID NO: 5914 - RNA, 22 nt, Artificial Sequence
  Description of Artificial Sequence: Synthetic oligonucleotide
guucaaucauaaguguaccauc

SEQ ID NO: 5915 - RNA, 22 nt, Artificial Sequence
  Description of Artificial Sequence: Synthetic oligonucleotide
cguucaaucauaaguguaccau

SEQ ID NO: 5916 - RNA, 22 nt, Artificial Sequence
  Description of Artificial Sequence: Synthetic oligonucleotide
gcagcaagcacaaaacaagcua

SEQ ID NO: 5917 - RNA, 22 nt, Artificial Sequence
  Description of Artificial Sequence: Synthetic oligonucleotide
gaguacauaaguucguacucau

SEQ ID NO: 5918 - RNA, 22 nt, Artificial Sequence
  Description of Artificial Sequence: Synthetic oligonucleotide
ugaguacauaaguucguacuca

SEQ ID NO: 5919 - RNA, 22 nt, Artificial Sequence
  Description of Artificial Sequence: Synthetic oligonucleotide
ccucuugucugaugaacaguuu

SEQ ID NO: 5920 - RNA, 22 nt, Artificial Sequence
  Description of Artificial Sequence: Synthetic oligonucleotide
uccucuugucugaugaacaguu

SEQ ID NO: 5921 - RNA, 22 nt, Artificial Sequence
  Description of Artificial Sequence: Synthetic oligonucleotide
uuucuacaucacuauaaacagu

SEQ ID NO: 5922 - RNA, 22 nt, Artificial Sequence
  Description of Artificial Sequence: Synthetic oligonucleotide
aaucccaacccauaaggugagg

SEQ ID NO: 5923 - RNA, 22 nt, Artificial Sequence
  Description of Artificial Sequence: Synthetic oligonucleotide
uaaucccaacccauaaggugag

SEQ ID NO: 5924 - RNA, 22 nt, Artificial Sequence
  Description of Artificial Sequence: Synthetic oligonucleotide
auaaucccaacccauaagguga

SEQ ID NO: 5925 - RNA, 22 nt, Artificial Sequence
  Description of Artificial Sequence: Synthetic oligonucleotide
gauaaucccaacccauaaggug

SEQ ID NO: 5926 - RNA, 22 nt, Artificial Sequence
  Description of Artificial Sequence: Synthetic oligonucleotide
ggauaaucccaacccauaaggu

SEQ ID NO: 5927 - RNA, 22 nt, Artificial Sequence
  Description of Artificial Sequence: Synthetic oligonucleotide
ccauuuaauagaaguuaaacca

SEQ ID NO: 5928 - RNA, 22 nt, Artificial Sequence
  Description of Artificial Sequence: Synthetic oligonucleotide
cccauuuaauagaaguuaaacc

SEQ ID NO: 5929 - RNA, 22 nt, Artificial Sequence
  Description of Artificial Sequence: Synthetic oligonucleotide
gcccauuuaauagaaguuaaac

SEQ ID NO: 5930 - RNA, 22 nt, Artificial Sequence
  Description of Artificial Sequence: Synthetic oligonucleotide
aaauucagauuuagccacauuc

SEQ ID NO: 5931 - RNA, 22 nt, Artificial Sequence
  Description of Artificial Sequence: Synthetic oligonucleotide
aauucagauuuagccacauuca

SEQ ID NO: 5932 - RNA, 22 nt, Artificial Sequence
  Description of Artificial Sequence: Synthetic oligonucleotide
auuuagccacauucaaagacuu

SEQ ID NO: 5933 - RNA, 22 nt, Artificial Sequence
  Description of Artificial Sequence: Synthetic oligonucleotide
agauuuagccacauucaaagac

SEQ ID NO: 5934 - RNA, 22 nt, Artificial Sequence
  Description of Artificial Sequence: Synthetic oligonucleotide
gauuuagccacauucaaagacu

SEQ ID NO: 5935 - RNA, 22 nt, Artificial Sequence
  Description of Artificial Sequence: Synthetic oligonucleotide
ucagauuuagccacauucaaag

SEQ ID NO: 5936 - RNA, 22 nt, Artificial Sequence
  Description of Artificial Sequence: Synthetic oligonucleotide
cagauuuagccacauucaaaga

SEQ ID NO: 5937 - RNA, 22 nt, Artificial Sequence
  Description of Artificial Sequence: Synthetic oligonucleotide
auucagauuuagccacauucaa

SEQ ID NO: 5938 - RNA, 22 nt, Artificial Sequence
  Description of Artificial Sequence: Synthetic oligonucleotide
ggcguacacguucaccuaaguu

SEQ ID NO: 5939 - RNA, 22 nt, Artificial Sequence
  Description of Artificial Sequence: Synthetic oligonucleotide
uggcguacacguucaccuaagu

SEQ ID NO: 5940 - RNA, 22 nt, Artificial Sequence
  Description of Artificial Sequence: Synthetic oligonucleotide
uuggcguacacguucaccuaag

SEQ ID NO: 5941 - RNA, 22 nt, Artificial Sequence
  Description of Artificial Sequence: Synthetic oligonucleotide
ugagaagaauguuaguuucugg

SEQ ID NO: 5942 - RNA, 22 nt, Artificial Sequence
  Description of Artificial Sequence: Synthetic oligonucleotide
uugagaagaauguuaguuucug

SEQ ID NO: 5943 - RNA, 22 nt, Artificial Sequence
  Description of Artificial Sequence: Synthetic oligonucleotide
aacaauuucagcaggacaacgc

SEQ ID NO: 5944 - RNA, 22 nt, Artificial Sequence
  Description of Artificial Sequence: Synthetic oligonucleotide
acaauuucagcaggacaacgcc

SEQ ID NO: 5945 - RNA, 22 nt, Artificial Sequence
  Description of Artificial Sequence: Synthetic oligonucleotide
caauuucagcaggacaacgccg

SEQ ID NO: 5946 - RNA, 22 nt, Artificial Sequence
  Description of Artificial Sequence: Synthetic oligonucleotide
aauuucagcaggacaacgccga

SEQ ID NO: 5947 - RNA, 22 nt, Artificial Sequence
  Description of Artificial Sequence: Synthetic oligonucleotide
auuucagcaggacaacgccgac

SEQ ID NO: 5948 - RNA, 22 nt, Artificial Sequence
  Description of Artificial Sequence: Synthetic oligonucleotide
uuucagcaggacaacgccgaca

SEQ ID NO: 5949 - RNA, 22 nt, Artificial Sequence
  Description of Artificial Sequence: Synthetic oligonucleotide
uucagcaggacaacgccgacaa

SEQ ID NO: 5950 - RNA, 22 nt, Artificial Sequence
  Description of Artificial Sequence: Synthetic oligonucleotide
gucaacaauuucagcaggacaa

SEQ ID NO: 5951 - RNA, 22 nt, Artificial Sequence
  Description of Artificial Sequence: Synthetic oligonucleotide
ucaacaauuucagcaggacaac

SEQ ID NO: 5952 - RNA, 22 nt, Artificial Sequence
  Description of Artificial Sequence: Synthetic oligonucleotide
cugaauugaaauauucugguuc

SEQ ID NO: 5953 - RNA, 22 nt, Artificial Sequence
  Description of Artificial Sequence: Synthetic oligonucleotide
uucuuacgaagaagaaccuugc

SEQ ID NO: 5954 - RNA, 22 nt, Artificial Sequence
  Description of Artificial Sequence: Synthetic oligonucleotide
ucuuacgaagaagaaccuugcg

SEQ ID NO: 5955 - RNA, 22 nt, Artificial Sequence
  Description of Artificial Sequence: Synthetic oligonucleotide
cuuacgaagaagaaccuugcgg

SEQ ID NO: 5956 - RNA, 22 nt, Artificial Sequence
  Description of Artificial Sequence: Synthetic oligonucleotide
uuacgaagaagaaccuugcggu

SEQ ID NO: 5957 - RNA, 22 nt, Artificial Sequence
  Description of Artificial Sequence: Synthetic oligonucleotide
accguucuuacgaagaagaacc

SEQ ID NO: 5958 - RNA, 22 nt, Artificial Sequence
  Description of Artificial Sequence: Synthetic oligonucleotide
ccguucuuacgaagaagaaccu

SEQ ID NO: 5959 - RNA, 22 nt, Artificial Sequence
  Description of Artificial Sequence: Synthetic oligonucleotide
cguucuuacgaagaagaaccuu

SEQ ID NO: 5960 - RNA, 22 nt, Artificial Sequence
  Description of Artificial Sequence: Synthetic oligonucleotide
guucuuacgaagaagaaccuug

SEQ ID NO: 5961 - RNA, 22 nt, Artificial Sequence
  Description of Artificial Sequence: Synthetic oligonucleotide
uuaccguucuuacgaagaagaa

SEQ ID NO: 5962 - RNA, 22 nt, Artificial Sequence
  Description of Artificial Sequence: Synthetic oligonucleotide
uaccguucuuacgaagaagaac

SEQ ID NO: 5963 - RNA, 22 nt, Artificial Sequence
  Description of Artificial Sequence: Synthetic oligonucleotide
auaggcagcucucccuagcauu

SEQ ID NO: 5964 - RNA, 22 nt, Artificial Sequence
  Description of Artificial Sequence: Synthetic oligonucleotide
uauaggcagcucucccuagcau

SEQ ID NO: 5965 - RNA, 22 nt, Artificial Sequence
  Description of Artificial Sequence: Synthetic oligonucleotide
auauaggcagcucucccuagca

SEQ ID NO: 5966 - RNA, 22 nt, Artificial Sequence
  Description of Artificial Sequence: Synthetic oligonucleotide
ccugugaugaaucaacaguuug

SEQ ID NO: 5967 - RNA, 22 nt, Artificial Sequence
  Description of Artificial Sequence: Synthetic oligonucleotide
gagcccugugaugaaucaacag

SEQ ID NO: 5968 - RNA, 22 nt, Artificial Sequence
  Description of Artificial Sequence: Synthetic oligonucleotide
cacaagacaucugucguagugc

SEQ ID NO: 5969 - RNA, 22 nt, Artificial Sequence
  Description of Artificial Sequence: Synthetic oligonucleotide
cccugugaugaaucaacaguuu

SEQ ID NO: 5970 - RNA, 22 nt, Artificial Sequence
  Description of Artificial Sequence: Synthetic oligonucleotide
cagcaaagucauagaagucuuu

SEQ ID NO: 5971 - RNA, 22 nt, Artificial Sequence
  Description of Artificial Sequence: Synthetic oligonucleotide
caccaaagcauaaaugaaauuu

SEQ ID NO: 5972 - RNA, 22 nt, Artificial Sequence
  Description of Artificial Sequence: Synthetic oligonucleotide
accaaagcauaaaugaaauuuc

SEQ ID NO: 5973 - RNA, 22 nt, Artificial Sequence
  Description of Artificial Sequence: Synthetic oligonucleotide
uacaccaaagcauaaaugaaau

SEQ ID NO: 5974 - RNA, 22 nt, Artificial Sequence
  Description of Artificial Sequence: Synthetic oligonucleotide
acaccaaagcauaaaugaaauu

SEQ ID NO: 5975 - RNA, 22 nt, Artificial Sequence
  Description of Artificial Sequence: Synthetic oligonucleotide
uuacaccaaagcauaaaugaaa

SEQ ID NO: 5976 - RNA, 22 nt, Artificial Sequence
  Description of Artificial Sequence: Synthetic oligonucleotide
agucaacgagaugaaacaucug

SEQ ID NO: 5977 - RNA, 22 nt, Artificial Sequence
  Description of Artificial Sequence: Synthetic oligonucleotide
gucaacgagaugaaacaucugu

SEQ ID NO: 5978 - RNA, 22 nt, Artificial Sequence
  Description of Artificial Sequence: Synthetic oligonucleotide
ucaacgagaugaaacaucuguu

SEQ ID NO: 5979 - RNA, 22 nt, Artificial Sequence
  Description of Artificial Sequence: Synthetic oligonucleotide
caacgagaugaaacaucuguug

SEQ ID NO: 5980 - RNA, 22 nt, Artificial Sequence
  Description of Artificial Sequence: Synthetic oligonucleotide
aagucaacgagaugaaacaucu

SEQ ID NO: 5981 - RNA, 22 nt, Artificial Sequence
  Description of Artificial Sequence: Synthetic oligonucleotide
cauccgaaagggagugaggcuu

SEQ ID NO: 5982 - RNA, 22 nt, Artificial Sequence
  Description of Artificial Sequence: Synthetic oligonucleotide
ccauccgaaagggagugaggcu

SEQ ID NO: 5983 - RNA, 22 nt, Artificial Sequence
  Description of Artificial Sequence: Synthetic oligonucleotide
gccauccgaaagggagugaggc

SEQ ID NO: 5984 - RNA, 22 nt, Artificial Sequence
  Description of Artificial Sequence: Synthetic oligonucleotide
agccauccgaaagggagugagg

SEQ ID NO: 5985 - RNA, 22 nt, Artificial Sequence
  Description of Artificial Sequence: Synthetic oligonucleotide
cgaaagggagugaggcuuguau

SEQ ID NO: 5986 - RNA, 22 nt, Artificial Sequence
  Description of Artificial Sequence: Synthetic oligonucleotide
ccgaaagggagugaggcuugua

SEQ ID NO: 5987 - RNA, 22 nt, Artificial Sequence
  Description of Artificial Sequence: Synthetic oligonucleotide
uccgaaagggagugaggcuugu

SEQ ID NO: 5988 - RNA, 22 nt, Artificial Sequence
  Description of Artificial Sequence: Synthetic oligonucleotide
auccgaaagggagugaggcuug

SEQ ID NO: 5989 - RNA, 22 nt, Artificial Sequence
  Description of Artificial Sequence: Synthetic oligonucleotide
aagccauccgaaagggagugag

SEQ ID NO: 5990 - RNA, 22 nt, Artificial Sequence
  Description of Artificial Sequence: Synthetic oligonucleotide
uaagccauccgaaagggaguga

SEQ ID NO: 5991 - RNA, 22 nt, Artificial Sequence
  Description of Artificial Sequence: Synthetic oligonucleotide
uaaagaucagcauuccaagaau

SEQ ID NO: 5992 - RNA, 22 nt, Artificial Sequence
  Description of Artificial Sequence: Synthetic oligonucleotide
gcaaccucauugaggcggucaa

SEQ ID NO: 5993 - RNA, 22 nt, Artificial Sequence
  Description of Artificial Sequence: Synthetic oligonucleotide
cucauugaggcggucaauuucu

SEQ ID NO: 5994 - RNA, 22 nt, Artificial Sequence
  Description of Artificial Sequence: Synthetic oligonucleotide
ucauugaggcggucaauuucuu

SEQ ID NO: 5995 - RNA, 22 nt, Artificial Sequence
  Description of Artificial Sequence: Synthetic oligonucleotide
cauugaggcggucaauuucuuu

SEQ ID NO: 5996 - RNA, 22 nt, Artificial Sequence
  Description of Artificial Sequence: Synthetic oligonucleotide
caaccucauugaggcggucaau

SEQ ID NO: 5997 - RNA, 22 nt, Artificial Sequence
  Description of Artificial Sequence: Synthetic oligonucleotide
aaccucauugaggcggucaauu

SEQ ID NO: 5998 - RNA, 22 nt, Artificial Sequence
  Description of Artificial Sequence: Synthetic oligonucleotide
accucauugaggcggucaauuu

SEQ ID NO: 5999 - RNA, 22 nt, Artificial Sequence
  Description of Artificial Sequence: Synthetic oligonucleotide
ccucauugaggcggucaauuuc

SEQ ID NO: 6000 - RNA, 22 nt, Artificial Sequence
  Description of Artificial Sequence: Synthetic oligonucleotide
gcagcaguacgcacacaaucga

SEQ ID NO: 6001 - RNA, 22 nt, Artificial Sequence
  Description of Artificial Sequence: Synthetic oligonucleotide
ugcagcaguacgcacacaaucg

SEQ ID NO: 6002 - RNA, 22 nt, Artificial Sequence
  Description of Artificial Sequence: Synthetic oligonucleotide
uauugcagcaguacgcacacaa

SEQ ID NO: 6003 - RNA, 22 nt, Artificial Sequence
  Description of Artificial Sequence: Synthetic oligonucleotide
auauugcagcaguacgcacaca

SEQ ID NO: 6004 - RNA, 22 nt, Artificial Sequence
  Description of Artificial Sequence: Synthetic oligonucleotide
aauauugcagcaguacgcacac

SEQ ID NO: 6005 - RNA, 22 nt, Artificial Sequence
  Description of Artificial Sequence: Synthetic oligonucleotide
caauauugcagcaguacgcaca

SEQ ID NO: 6006 - RNA, 22 nt, Artificial Sequence
  Description of Artificial Sequence: Synthetic oligonucleotide
aacaauauugcagcaguacgca

SEQ ID NO: 6007 - RNA, 22 nt, Artificial Sequence
  Description of Artificial Sequence: Synthetic oligonucleotide
aaacaacagcaucaccauaguc

SEQ ID NO: 6008 - RNA, 22 nt, Artificial Sequence
  Description of Artificial Sequence: Synthetic oligonucleotide
gcagaaaggcuaaaaagcacaa

SEQ ID NO: 6009 - RNA, 22 nt, Artificial Sequence
  Description of Artificial Sequence: Synthetic oligonucleotide
agcagaaaggcuaaaaagcaca

SEQ ID NO: 6010 - RNA, 22 nt, Artificial Sequence
  Description of Artificial Sequence: Synthetic oligonucleotide
uagcagaaaggcuaaaaagcac

SEQ ID NO: 6011 - RNA, 22 nt, Artificial Sequence
  Description of Artificial Sequence: Synthetic oligonucleotide
auagcagaaaggcuaaaaagca

SEQ ID NO: 6012 - RNA, 22 nt, Artificial Sequence
  Description of Artificial Sequence: Synthetic oligonucleotide
aaaggcuaaaaagcacaaauag

SEQ ID NO: 6013 - RNA, 22 nt, Artificial Sequence
  Description of Artificial Sequence: Synthetic oligonucleotide
cagaaaggcuaaaaagcacaaa

SEQ ID NO: 6014 - RNA, 22 nt, Artificial Sequence
  Description of Artificial Sequence: Synthetic oligonucleotide
aauagcagaaaggcuaaaaagc

SEQ ID NO: 6015 - RNA, 22 nt, Artificial Sequence
  Description of Artificial Sequence: Synthetic oligonucleotide
gaauagcagaaaggcuaaaaag

SEQ ID NO: 6016 - RNA, 22 nt, Artificial Sequence
  Description of Artificial Sequence: Synthetic oligonucleotide
uugguguauucaaggcucccuc

SEQ ID NO: 6017 - RNA, 22 nt, Artificial Sequence
  Description of Artificial Sequence: Synthetic oligonucleotide
uuugguguauucaaggcucccu

SEQ ID NO: 6018 - RNA, 22 nt, Artificial Sequence
  Description of Artificial Sequence: Synthetic oligonucleotide
uauucaaggcucccucaguugc

SEQ ID NO: 6019 - RNA, 22 nt, Artificial Sequence
  Description of Artificial Sequence: Synthetic oligonucleotide
guauucaaggcucccucaguug

SEQ ID NO: 6020 - RNA, 22 nt, Artificial Sequence
  Description of Artificial Sequence: Synthetic oligonucleotide
uucaaggcucccucaguugcaa

SEQ ID NO: 6021 - RNA, 22 nt, Artificial Sequence
  Description of Artificial Sequence: Synthetic oligonucleotide
auucaaggcucccucaguugca

SEQ ID NO: 6022 - RNA, 22 nt, Artificial Sequence
  Description of Artificial Sequence: Synthetic oligonucleotide
gguguauucaaggcucccucag

SEQ ID NO: 6023 - RNA, 22 nt, Artificial Sequence
  Description of Artificial Sequence: Synthetic oligonucleotide
ugguguauucaaggcucccuca

SEQ ID NO: 6024 - RNA, 22 nt, Artificial Sequence
  Description of Artificial Sequence: Synthetic oligonucleotide
uguauucaaggcucccucaguu

SEQ ID NO: 6025 - RNA, 22 nt, Artificial Sequence
  Description of Artificial Sequence: Synthetic oligonucleotide
guguauucaaggcucccucagu

SEQ ID NO: 6026 - RNA, 22 nt, Artificial Sequence
  Description of Artificial Sequence: Synthetic oligonucleotide
gaauugcccucguauguuccag

SEQ ID NO: 6027 - RNA, 22 nt, Artificial Sequence
  Description of Artificial Sequence: Synthetic oligonucleotide
aauugcccucguauguuccaga

SEQ ID NO: 6028 - RNA, 22 nt, Artificial Sequence
  Description of Artificial Sequence: Synthetic oligonucleotide
auagugcucuuguggcacuagu

SEQ ID NO: 6029 - RNA, 22 nt, Artificial Sequence
  Description of Artificial Sequence: Synthetic oligonucleotide
cauagugcucuuguggcacuag

SEQ ID NO: 6030 - RNA, 22 nt, Artificial Sequence
  Description of Artificial Sequence: Synthetic oligonucleotide
cucuuguggcacuaguguaggu

SEQ ID NO: 6031 - RNA, 22 nt, Artificial Sequence
  Description of Artificial Sequence: Synthetic oligonucleotide
gcucuuguggcacuaguguagg

SEQ ID NO: 6032 - RNA, 22 nt, Artificial Sequence
  Description of Artificial Sequence: Synthetic oligonucleotide
cuuguggcacuaguguaggugc

SEQ ID NO: 6033 - RNA, 22 nt, Artificial Sequence
  Description of Artificial Sequence: Synthetic oligonucleotide
ucuuguggcacuaguguaggug

SEQ ID NO: 6034 - RNA, 22 nt, Artificial Sequence
  Description of Artificial Sequence: Synthetic oligonucleotide
agugcucuuguggcacuagugu

SEQ ID NO: 6035 - RNA, 22 nt, Artificial Sequence
  Description of Artificial Sequence: Synthetic oligonucleotide
uagugcucuuguggcacuagug

SEQ ID NO: 6036 - RNA, 22 nt, Artificial Sequence
  Description of Artificial Sequence: Synthetic oligonucleotide
ugcucuuguggcacuaguguag

SEQ ID NO: 6037 - RNA, 22 nt, Artificial Sequence
  Description of Artificial Sequence: Synthetic oligonucleotide
gugcucuuguggcacuagugua

SEQ ID NO: 6038 - RNA, 22 nt, Artificial Sequence
  Description of Artificial Sequence: Synthetic oligonucleotide
cuuugagcguuucugcugcaaa

SEQ ID NO: 6039 - RNA, 22 nt, Artificial Sequence
  Description of Artificial Sequence: Synthetic oligonucleotide
gcuuugagcguuucugcugcaa

SEQ ID NO: 6040 - RNA, 22 nt, Artificial Sequence
  Description of Artificial Sequence: Synthetic oligonucleotide
gagcguuucugcugcaaaaagc

SEQ ID NO: 6041 - RNA, 22 nt, Artificial Sequence
  Description of Artificial Sequence: Synthetic oligonucleotide
ugagcguuucugcugcaaaaag

SEQ ID NO: 6042 - RNA, 22 nt, Artificial Sequence
  Description of Artificial Sequence: Synthetic oligonucleotide
uugagcguuucugcugcaaaaa

SEQ ID NO: 6043 - RNA, 22 nt, Artificial Sequence
  Description of Artificial Sequence: Synthetic oligonucleotide
uuugagcguuucugcugcaaaa

SEQ ID NO: 6044 - RNA, 22 nt, Artificial Sequence
  Description of Artificial Sequence: Synthetic oligonucleotide
guuucugcugcaaaaagcuuga

SEQ ID NO: 6045 - RNA, 22 nt, Artificial Sequence
  Description of Artificial Sequence: Synthetic oligonucleotide
cguuucugcugcaaaaagcuug

SEQ ID NO: 6046 - RNA, 22 nt, Artificial Sequence
  Description of Artificial Sequence: Synthetic oligonucleotide
gcguuucugcugcaaaaagcuu

SEQ ID NO: 6047 - RNA, 22 nt, Artificial Sequence
  Description of Artificial Sequence: Synthetic oligonucleotide
agcguuucugcugcaaaaagcu

SEQ ID NO: 6048 - RNA, 22 nt, Artificial Sequence
  Description of Artificial Sequence: Synthetic oligonucleotide
ccuguuuaacuagcauuguaug

SEQ ID NO: 6049 - RNA, 22 nt, Artificial Sequence
  Description of Artificial Sequence: Synthetic oligonucleotide
cccuguuuaacuagcauuguau

SEQ ID NO: 6050 - RNA, 22 nt, Artificial Sequence
  Description of Artificial Sequence: Synthetic oligonucleotide
caccaccuaaauugcaacgugu

SEQ ID NO: 6051 - RNA, 22 nt, Artificial Sequence
  Description of Artificial Sequence: Synthetic oligonucleotide
agcagguggugcugacaucaua

SEQ ID NO: 6052 - RNA, 22 nt, Artificial Sequence
  Description of Artificial Sequence: Synthetic oligonucleotide
agguggugcugacaucauaaca

SEQ ID NO: 6053 - RNA, 22 nt, Artificial Sequence
  Description of Artificial Sequence: Synthetic oligonucleotide
cauacuuaagauucauuugagu

SEQ ID NO: 6054 - RNA, 22 nt, Artificial Sequence
  Description of Artificial Sequence: Synthetic oligonucleotide
gcauacuuaagauucauuugag

SEQ ID NO: 6055 - RNA, 22 nt, Artificial Sequence
  Description of Artificial Sequence: Synthetic oligonucleotide
uaagauucauuugaguuauagu

SEQ ID NO: 6056 - RNA, 22 nt, Artificial Sequence
  Description of Artificial Sequence: Synthetic oligonucleotide
uuaagauucauuugaguuauag

SEQ ID NO: 6057 - RNA, 22 nt, Artificial Sequence
  Description of Artificial Sequence: Synthetic oligonucleotide
agauucauuugaguuauaguag

SEQ ID NO: 6058 - RNA, 22 nt, Artificial Sequence
  Description of Artificial Sequence: Synthetic oligonucleotide
aagauucauuugaguuauagua

SEQ ID NO: 6059 - RNA, 22 nt, Artificial Sequence
  Description of Artificial Sequence: Synthetic oligonucleotide
uacuuaagauucauuugaguua

SEQ ID NO: 6060 - RNA, 22 nt, Artificial Sequence
  Description of Artificial Sequence: Synthetic oligonucleotide
auacuuaagauucauuugaguu

SEQ ID NO: 6061 - RNA, 22 nt, Artificial Sequence
  Description of Artificial Sequence: Synthetic oligonucleotide
cuuaagauucauuugaguuaua

SEQ ID NO: 6062 - RNA, 22 nt, Artificial Sequence
  Description of Artificial Sequence: Synthetic oligonucleotide
acuuaagauucauuugaguuau

SEQ ID NO: 6063 - RNA, 22 nt, Artificial Sequence
  Description of Artificial Sequence: Synthetic oligonucleotide
ugguauccaguugaaacuacaa

SEQ ID NO: 6064 - RNA, 22 nt, Artificial Sequence
  Description of Artificial Sequence: Synthetic oligonucleotide
gguauccaguugaaacuacaaa

SEQ ID NO: 6065 - RNA, 22 nt, Artificial Sequence
  Description of Artificial Sequence: Synthetic oligonucleotide
agguugcaaaggaucauaaacu

SEQ ID NO: 6066 - RNA, 22 nt, Artificial Sequence
  Description of Artificial Sequence: Synthetic oligonucleotide
cagguugcaaaggaucauaaac

SEQ ID NO: 6067 - RNA, 22 nt, Artificial Sequence
  Description of Artificial Sequence: Synthetic oligonucleotide
aaggaucauaaacuguguuguu

SEQ ID NO: 6068 - RNA, 22 nt, Artificial Sequence
  Description of Artificial Sequence: Synthetic oligonucleotide
aaaggaucauaaacuguguugu

SEQ ID NO: 6069 - RNA, 22 nt, Artificial Sequence
  Description of Artificial Sequence: Synthetic oligonucleotide
caaaggaucauaaacuguguug

SEQ ID NO: 6070 - RNA, 22 nt, Artificial Sequence
  Description of Artificial Sequence: Synthetic oligonucleotide
gcaaaggaucauaaacuguguu

SEQ ID NO: 6071 - RNA, 22 nt, Artificial Sequence
  Description of Artificial Sequence: Synthetic oligonucleotide
ugcaaaggaucauaaacugugu

SEQ ID NO: 6072 - RNA, 22 nt, Artificial Sequence
  Description of Artificial Sequence: Synthetic oligonucleotide
uugcaaaggaucauaaacugug

SEQ ID NO: 6073 - RNA, 22 nt, Artificial Sequence
  Description of Artificial Sequence: Synthetic oligonucleotide
guugcaaaggaucauaaacugu

SEQ ID NO: 6074 - RNA, 22 nt, Artificial Sequence
  Description of Artificial Sequence: Synthetic oligonucleotide
gguugcaaaggaucauaaacug

SEQ ID NO: 6075 - RNA, 22 nt, Artificial Sequence
  Description of Artificial Sequence: Synthetic oligonucleotide
guuacacacugauuaaagauug

SEQ ID NO: 6076 - RNA, 22 nt, Artificial Sequence
  Description of Artificial Sequence: Synthetic oligonucleotide
uguuacacacugauuaaagauu

SEQ ID NO: 6077 - RNA, 22 nt, Artificial Sequence
  Description of Artificial Sequence: Synthetic oligonucleotide
cugauuaaagauugcuauguga

SEQ ID NO: 6078 - RNA, 22 nt, Artificial Sequence
  Description of Artificial Sequence: Synthetic oligonucleotide
acugauuaaagauugcuaugug

SEQ ID NO: 6079 - RNA, 22 nt, Artificial Sequence
  Description of Artificial Sequence: Synthetic oligonucleotide
cacugauuaaagauugcuaugu

SEQ ID NO: 6080 - RNA, 22 nt, Artificial Sequence
  Description of Artificial Sequence: Synthetic oligonucleotide
acacugauuaaagauugcuaug

SEQ ID NO: 6081 - RNA, 22 nt, Artificial Sequence
  Description of Artificial Sequence: Synthetic oligonucleotide
cacacugauuaaagauugcuau

SEQ ID NO: 6082 - RNA, 22 nt, Artificial Sequence
  Description of Artificial Sequence: Synthetic oligonucleotide
acacacugauuaaagauugcua

SEQ ID NO: 6083 - RNA, 22 nt, Artificial Sequence
  Description of Artificial Sequence: Synthetic oligonucleotide
uacacacugauuaaagauugcu

SEQ ID NO: 6084 - RNA, 22 nt, Artificial Sequence
  Description of Artificial Sequence: Synthetic oligonucleotide
uuacacacugauuaaagauugc

SEQ ID NO: 6085 - RNA, 22 nt, Artificial Sequence
  Description of Artificial Sequence: Synthetic oligonucleotide
uccuuccuuaaagaaacccuua

SEQ ID NO: 6086 - RNA, 22 nt, Artificial Sequence
  Description of Artificial Sequence: Synthetic oligonucleotide
ccuuccuuaaagaaacccuuag

SEQ ID NO: 6087 - RNA, 22 nt, Artificial Sequence
  Description of Artificial Sequence: Synthetic oligonucleotide
cuuccuuaaagaaacccuuaga

SEQ ID NO: 6088 - RNA, 22 nt, Artificial Sequence
  Description of Artificial Sequence: Synthetic oligonucleotide
uuccuuaaagaaacccuuagac

SEQ ID NO: 6089 - RNA, 22 nt, Artificial Sequence
  Description of Artificial Sequence: Synthetic oligonucleotide
aacuuccuuccuuaaagaaacc

SEQ ID NO: 6090 - RNA, 22 nt, Artificial Sequence
  Description of Artificial Sequence: Synthetic oligonucleotide
acuuccuuccuuaaagaaaccc

SEQ ID NO: 6091 - RNA, 22 nt, Artificial Sequence
  Description of Artificial Sequence: Synthetic oligonucleotide
cuuccuuccuuaaagaaacccu

SEQ ID NO: 6092 - RNA, 22 nt, Artificial Sequence
  Description of Artificial Sequence: Synthetic oligonucleotide
uuccuuccuuaaagaaacccuu

SEQ ID NO: 6093 - RNA, 22 nt, Artificial Sequence
  Description of Artificial Sequence: Synthetic oligonucleotide
agaacuuccuuccuuaaagaaa

SEQ ID NO: 6094 - RNA, 22 nt, Artificial Sequence
  Description of Artificial Sequence: Synthetic oligonucleotide
gaacuuccuuccuuaaagaaac

SEQ ID NO: 6095 - RNA, 22 nt, Artificial Sequence
  Description of Artificial Sequence: Synthetic oligonucleotide
aaauccauaaguucguuuaugu

SEQ ID NO: 6096 - RNA, 22 nt, Artificial Sequence
  Description of Artificial Sequence: Synthetic oligonucleotide
caaauccauaaguucguuuaug

SEQ ID NO: 6097 - RNA, 22 nt, Artificial Sequence
  Description of Artificial Sequence: Synthetic oligonucleotide
auccauaaguucguuuaugugu

SEQ ID NO: 6098 - RNA, 22 nt, Artificial Sequence
  Description of Artificial Sequence: Synthetic oligonucleotide
aauccauaaguucguuuaugug

SEQ ID NO: 6099 - RNA, 22 nt, Artificial Sequence
  Description of Artificial Sequence: Synthetic oligonucleotide
uugacaacacucaaaucauaau

SEQ ID NO: 6100 - RNA, 22 nt, Artificial Sequence
  Description of Artificial Sequence: Synthetic oligonucleotide
gcauugacaacacucaaaucau

SEQ ID NO: 6101 - RNA, 22 nt, Artificial Sequence
  Description of Artificial Sequence: Synthetic oligonucleotide
auugacaacacucaaaucauaa

SEQ ID NO: 6102 - RNA, 22 nt, Artificial Sequence
  Description of Artificial Sequence: Synthetic oligonucleotide
cauugacaacacucaaaucaua

SEQ ID NO: 6103 - RNA, 22 nt, Artificial Sequence
  Description of Artificial Sequence: Synthetic oligonucleotide
uaauucuacuacauuuaucuau

SEQ ID NO: 6104 - RNA, 22 nt, Artificial Sequence
  Description of Artificial Sequence: Synthetic oligonucleotide
uucuacuacauuuaucuauagg

SEQ ID NO: 6105 - RNA, 22 nt, Artificial Sequence
  Description of Artificial Sequence: Synthetic oligonucleotide
auucuacuacauuuaucuauag

SEQ ID NO: 6106 - RNA, 22 nt, Artificial Sequence
  Description of Artificial Sequence: Synthetic oligonucleotide
cuacuacauuuaucuauaggca

SEQ ID NO: 6107 - RNA, 22 nt, Artificial Sequence
  Description of Artificial Sequence: Synthetic oligonucleotide
ucuacuacauuuaucuauaggc

SEQ ID NO: 6108 - RNA, 22 nt, Artificial Sequence
  Description of Artificial Sequence: Synthetic oligonucleotide
auuaacguaccugucucuuccg

SEQ ID NO: 6109 - RNA, 22 nt, Artificial Sequence
  Description of Artificial Sequence: Synthetic oligonucleotide
accugucucuuccgaaacgaau

SEQ ID NO: 6110 - RNA, 22 nt, Artificial Sequence
  Description of Artificial Sequence: Synthetic oligonucleotide
uaccugucucuuccgaaacgaa

SEQ ID NO: 6111 - RNA, 22 nt, Artificial Sequence
  Description of Artificial Sequence: Synthetic oligonucleotide
guaccugucucuuccgaaacga

SEQ ID NO: 6112 - RNA, 22 nt, Artificial Sequence
  Description of Artificial Sequence: Synthetic oligonucleotide
cguaccugucucuuccgaaacg

SEQ ID NO: 6113 - RNA, 22 nt, Artificial Sequence
  Description of Artificial Sequence: Synthetic oligonucleotide
acguaccugucucuuccgaaac

SEQ ID NO: 6114 - RNA, 22 nt, Artificial Sequence
  Description of Artificial Sequence: Synthetic oligonucleotide
aacguaccugucucuuccgaaa

SEQ ID NO: 6115 - RNA, 22 nt, Artificial Sequence
  Description of Artificial Sequence: Synthetic oligonucleotide
uaacguaccugucucuuccgaa

SEQ ID NO: 6116 - RNA, 22 nt, Artificial Sequence
  Description of Artificial Sequence: Synthetic oligonucleotide
uuaacguaccugucucuuccga

SEQ ID NO: 6117 - RNA, 22 nt, Artificial Sequence
  Description of Artificial Sequence: Synthetic oligonucleotide
gucucuuccgaaacgaaugagu

SEQ ID NO: 6118 - RNA, 22 nt, Artificial Sequence
  Description of Artificial Sequence: Synthetic oligonucleotide
ugucucuuccgaaacgaaugag

SEQ ID NO: 6119 - RNA, 22 nt, Artificial Sequence
  Description of Artificial Sequence: Synthetic oligonucleotide
aauaagaaagcguucgugaugu

SEQ ID NO: 6120 - RNA, 22 nt, Artificial Sequence
  Description of Artificial Sequence: Synthetic oligonucleotide
uuguaauaagaaagcguucgug

SEQ ID NO: 6121 - RNA, 22 nt, Artificial Sequence
  Description of Artificial Sequence: Synthetic oligonucleotide
uagcauaagcaguuguggcauc

SEQ ID NO: 6122 - RNA, 22 nt, Artificial Sequence
  Description of Artificial Sequence: Synthetic oligonucleotide
cucuuagggaaucuagcccauu

SEQ ID NO: 6123 - RNA, 22 nt, Artificial Sequence
  Description of Artificial Sequence: Synthetic oligonucleotide
ucuuagggaaucuagcccauuu

SEQ ID NO: 6124 - RNA, 22 nt, Artificial Sequence
  Description of Artificial Sequence: Synthetic oligonucleotide
cacucuuagggaaucuagccca

SEQ ID NO: 6125 - RNA, 22 nt, Artificial Sequence
  Description of Artificial Sequence: Synthetic oligonucleotide
acucuuagggaaucuagcccau

SEQ ID NO: 6126 - RNA, 22 nt, Artificial Sequence
  Description of Artificial Sequence: Synthetic oligonucleotide
cuuagggaaucuagcccauuuc

SEQ ID NO: 6127 - RNA, 22 nt, Artificial Sequence
  Description of Artificial Sequence: Synthetic oligonucleotide
uuagggaaucuagcccauuuca

SEQ ID NO: 6128 - RNA, 22 nt, Artificial Sequence
  Description of Artificial Sequence: Synthetic oligonucleotide
aucacucuuagggaaucuagcc

SEQ ID NO: 6129 - RNA, 22 nt, Artificial Sequence
  Description of Artificial Sequence: Synthetic oligonucleotide
ucacucuuagggaaucuagccc

SEQ ID NO: 6130 - RNA, 22 nt, Artificial Sequence
  Description of Artificial Sequence: Synthetic oligonucleotide
aucuccauaaacgauauguucg

SEQ ID NO: 6131 - RNA, 22 nt, Artificial Sequence
  Description of Artificial Sequence: Synthetic oligonucleotide
ucuccauaaacgauauguucga

SEQ ID NO: 6132 - RNA, 22 nt, Artificial Sequence
  Description of Artificial Sequence: Synthetic oligonucleotide
auaaacgauauguucgaaggca

SEQ ID NO: 6133 - RNA, 22 nt, Artificial Sequence
  Description of Artificial Sequence: Synthetic oligonucleotide
uaaacgauauguucgaaggcau

SEQ ID NO: 6134 - RNA, 22 nt, Artificial Sequence
  Description of Artificial Sequence: Synthetic oligonucleotide
aaacgauauguucgaaggcaua

SEQ ID NO: 6135 - RNA, 22 nt, Artificial Sequence
  Description of Artificial Sequence: Synthetic oligonucleotide
aacgauauguucgaaggcauag

SEQ ID NO: 6136 - RNA, 22 nt, Artificial Sequence
  Description of Artificial Sequence: Synthetic oligonucleotide
cuccauaaacgauauguucgaa

SEQ ID NO: 6137 - RNA, 22 nt, Artificial Sequence
  Description of Artificial Sequence: Synthetic oligonucleotide
uccauaaacgauauguucgaag

SEQ ID NO: 6138 - RNA, 22 nt, Artificial Sequence
  Description of Artificial Sequence: Synthetic oligonucleotide
ccauaaacgauauguucgaagg

SEQ ID NO: 6139 - RNA, 22 nt, Artificial Sequence
  Description of Artificial Sequence: Synthetic oligonucleotide
cauaaacgauauguucgaaggc

SEQ ID NO: 6140 - RNA, 22 nt, Artificial Sequence
  Description of Artificial Sequence: Synthetic oligonucleotide
caaagucauuaagaucugaauc

SEQ ID NO: 6141 - RNA, 22 nt, Artificial Sequence
  Description of Artificial Sequence: Synthetic oligonucleotide
aagucauuaagaucugaaucga

SEQ ID NO: 6142 - RNA, 22 nt, Artificial Sequence
  Description of Artificial Sequence: Synthetic oligonucleotide
agucauuaagaucugaaucgac

SEQ ID NO: 6143 - RNA, 22 nt, Artificial Sequence
  Description of Artificial Sequence: Synthetic oligonucleotide
ucaacgguaauaguaccguugg

SEQ ID NO: 6144 - RNA, 22 nt, Artificial Sequence
  Description of Artificial Sequence: Synthetic oligonucleotide
aaguagcugagccacaucaagc

SEQ ID NO: 6145 - RNA, 22 nt, Artificial Sequence
  Description of Artificial Sequence: Synthetic oligonucleotide
gaaguagcugagccacaucaag

SEQ ID NO: 6146 - RNA, 22 nt, Artificial Sequence
  Description of Artificial Sequence: Synthetic oligonucleotide
guagcugagccacaucaagccu

SEQ ID NO: 6147 - RNA, 22 nt, Artificial Sequence
  Description of Artificial Sequence: Synthetic oligonucleotide
aguagcugagccacaucaagcc

SEQ ID NO: 6148 - RNA, 22 nt, Artificial Sequence
  Description of Artificial Sequence: Synthetic oligonucleotide
ugucaacacauaaaccuucagu

SEQ ID NO: 6149 - RNA, 22 nt, Artificial Sequence
  Description of Artificial Sequence: Synthetic oligonucleotide
augucaacacauaaaccuucag

SEQ ID NO: 6150 - RNA, 22 nt, Artificial Sequence
  Description of Artificial Sequence: Synthetic oligonucleotide
uaugucaacacauaaaccuuca

SEQ ID NO: 6151 - RNA, 22 nt, Artificial Sequence
  Description of Artificial Sequence: Synthetic oligonucleotide
guaugucaacacauaaaccuuc

SEQ ID NO: 6152 - RNA, 22 nt, Artificial Sequence
  Description of Artificial Sequence: Synthetic oligonucleotide
gguaugucaacacauaaaccuu

SEQ ID NO: 6153 - RNA, 22 nt, Artificial Sequence
  Description of Artificial Sequence: Synthetic oligonucleotide
ucacagugucaacaauuucagc

SEQ ID NO: 6154 - RNA, 22 nt, Artificial Sequence
  Description of Artificial Sequence: Synthetic oligonucleotide
cucacagugucaacaauuucag

SEQ ID NO: 6155 - RNA, 22 nt, Artificial Sequence
  Description of Artificial Sequence: Synthetic oligonucleotide
acagugucaacaauuucagcag

SEQ ID NO: 6156 - RNA, 22 nt, Artificial Sequence
  Description of Artificial Sequence: Synthetic oligonucleotide
cacagugucaacaauuucagca

SEQ ID NO: 6157 - RNA, 22 nt, Artificial Sequence
  Description of Artificial Sequence: Synthetic oligonucleotide
agugucaacaauuucagcagga

SEQ ID NO: 6158 - RNA, 22 nt, Artificial Sequence
  Description of Artificial Sequence: Synthetic oligonucleotide
cagugucaacaauuucagcagg

SEQ ID NO: 6159 - RNA, 22 nt, Artificial Sequence
  Description of Artificial Sequence: Synthetic oligonucleotide
ugucaacaauuucagcaggaca

SEQ ID NO: 6160 - RNA, 22 nt, Artificial Sequence
  Description of Artificial Sequence: Synthetic oligonucleotide
gugucaacaauuucagcaggac

SEQ ID NO: 6161 - RNA, 22 nt, Artificial Sequence
  Description of Artificial Sequence: Synthetic oligonucleotide
caucugugacaucacaaccugg

SEQ ID NO: 6162 - RNA, 22 nt, Artificial Sequence
  Description of Artificial Sequence: Synthetic oligonucleotide
acaucugugacaucacaaccug

SEQ ID NO: 6163 - RNA, 22 nt, Artificial Sequence
  Description of Artificial Sequence: Synthetic oligonucleotide
gugaauuauaaggugaaauaaa

SEQ ID NO: 6164 - RNA, 22 nt, Artificial Sequence
  Description of Artificial Sequence: Synthetic oligonucleotide
ugugaauuauaaggugaaauaa

SEQ ID NO: 6165 - RNA, 22 nt, Artificial Sequence
  Description of Artificial Sequence: Synthetic oligonucleotide
cugugaauuauaaggugaaaua

SEQ ID NO: 6166 - RNA, 22 nt, Artificial Sequence
  Description of Artificial Sequence: Synthetic oligonucleotide
uucugugaauuauaaggugaaa

SEQ ID NO: 6167 - RNA, 22 nt, Artificial Sequence
  Description of Artificial Sequence: Synthetic oligonucleotide
ccacuacgaccguacugaaugc

SEQ ID NO: 6168 - RNA, 22 nt, Artificial Sequence
  Description of Artificial Sequence: Synthetic oligonucleotide
accacuacgaccguacugaaug

SEQ ID NO: 6169 - RNA, 22 nt, Artificial Sequence
  Description of Artificial Sequence: Synthetic oligonucleotide
guucgugauguagcaacaguga

SEQ ID NO: 6170 - RNA, 22 nt, Artificial Sequence
  Description of Artificial Sequence: Synthetic oligonucleotide
uucgugauguagcaacagugau

SEQ ID NO: 6171 - RNA, 22 nt, Artificial Sequence
  Description of Artificial Sequence: Synthetic oligonucleotide
gccuguuuauacauuuggguca

SEQ ID NO: 6172 - RNA, 22 nt, Artificial Sequence
  Description of Artificial Sequence: Synthetic oligonucleotide
uguuuauacauuugggucauag

SEQ ID NO: 6173 - RNA, 22 nt, Artificial Sequence
  Description of Artificial Sequence: Synthetic oligonucleotide
guuuauacauuugggucauagc

SEQ ID NO: 6174 - RNA, 22 nt, Artificial Sequence
  Description of Artificial Sequence: Synthetic oligonucleotide
ccuguuuauacauuugggucau

SEQ ID NO: 6175 - RNA, 22 nt, Artificial Sequence
  Description of Artificial Sequence: Synthetic oligonucleotide
cuguuuauacauuugggucaua

SEQ ID NO: 6176 - RNA, 22 nt, Artificial Sequence
  Description of Artificial Sequence: Synthetic oligonucleotide
gcuaaguuguuuaacaagcgug

SEQ ID NO: 6177 - RNA, 22 nt, Artificial Sequence
  Description of Artificial Sequence: Synthetic oligonucleotide
cuaaguuguuuaacaagcgugu

SEQ ID NO: 6178 - RNA, 22 nt, Artificial Sequence
  Description of Artificial Sequence: Synthetic oligonucleotide
gagcuaaguuguuuaacaagcg

SEQ ID NO: 6179 - RNA, 22 nt, Artificial Sequence
  Description of Artificial Sequence: Synthetic oligonucleotide
gcagcuacugaaaagcacguag

SEQ ID NO: 6180 - RNA, 22 nt, Artificial Sequence
  Description of Artificial Sequence: Synthetic oligonucleotide
ugcagcuacugaaaagcacgua

SEQ ID NO: 6181 - RNA, 22 nt, Artificial Sequence
  Description of Artificial Sequence: Synthetic oligonucleotide
agcuacugaaaagcacguagug

SEQ ID NO: 6182 - RNA, 22 nt, Artificial Sequence
  Description of Artificial Sequence: Synthetic oligonucleotide
cagcuacugaaaagcacguagu

SEQ ID NO: 6183 - RNA, 22 nt, Artificial Sequence
  Description of Artificial Sequence: Synthetic oligonucleotide
cuacugaaaagcacguagugcg

SEQ ID NO: 6184 - RNA, 22 nt, Artificial Sequence
  Description of Artificial Sequence: Synthetic oligonucleotide
gcuacugaaaagcacguagugc

SEQ ID NO: 6185 - RNA, 22 nt, Artificial Sequence
  Description of Artificial Sequence: Synthetic oligonucleotide
acugaaaagcacguagugcguu

SEQ ID NO: 6186 - RNA, 22 nt, Artificial Sequence
  Description of Artificial Sequence: Synthetic oligonucleotide
uacugaaaagcacguagugcgu

SEQ ID NO: 6187 - RNA, 22 nt, Artificial Sequence
  Description of Artificial Sequence: Synthetic oligonucleotide
gugcagcuacugaaaagcacgu

SEQ ID NO: 6188 - RNA, 22 nt, Artificial Sequence
  Description of Artificial Sequence: Synthetic oligonucleotide
agugcagcuacugaaaagcacg

SEQ ID NO: 6189 - RNA, 22 nt, Artificial Sequence
  Description of Artificial Sequence: Synthetic oligonucleotide
uuugcgacauucaucauuaugc

SEQ ID NO: 6190 - RNA, 22 nt, Artificial Sequence
  Description of Artificial Sequence: Synthetic oligonucleotide
auugacacaguugaguauauuu

SEQ ID NO: 6191 - RNA, 22 nt, Artificial Sequence
  Description of Artificial Sequence: Synthetic oligonucleotide
ugcgacauucaucauuaugccu

SEQ ID NO: 6192 - RNA, 22 nt, Artificial Sequence
  Description of Artificial Sequence: Synthetic oligonucleotide
uugcgacauucaucauuaugcc

SEQ ID NO: 6193 - RNA, 22 nt, Artificial Sequence
  Description of Artificial Sequence: Synthetic oligonucleotide
cgacauucaucauuaugccuuu

SEQ ID NO: 6194 - RNA, 22 nt, Artificial Sequence
  Description of Artificial Sequence: Synthetic oligonucleotide
gcgacauucaucauuaugccuu

SEQ ID NO: 6195 - RNA, 22 nt, Artificial Sequence
  Description of Artificial Sequence: Synthetic oligonucleotide
uauugacacaguugaguauauu

SEQ ID NO: 6196 - RNA, 22 nt, Artificial Sequence
  Description of Artificial Sequence: Synthetic oligonucleotide
acggacgaaaccguaagcagcc

SEQ ID NO: 6197 - RNA, 22 nt, Artificial Sequence
  Description of Artificial Sequence: Synthetic oligonucleotide
cggacgaaaccguaagcagccu

SEQ ID NO: 6198 - RNA, 22 nt, Artificial Sequence
  Description of Artificial Sequence: Synthetic oligonucleotide
acacggacgaaaccguaagcag

SEQ ID NO: 6199 - RNA, 22 nt, Artificial Sequence
  Description of Artificial Sequence: Synthetic oligonucleotide
cacggacgaaaccguaagcagc

SEQ ID NO: 6200 - RNA, 22 nt, Artificial Sequence
  Description of Artificial Sequence: Synthetic oligonucleotide
caacacggacgaaaccguaagc

SEQ ID NO: 6201 - RNA, 22 nt, Artificial Sequence
  Description of Artificial Sequence: Synthetic oligonucleotide
aacacggacgaaaccguaagca

SEQ ID NO: 6202 - RNA, 22 nt, Artificial Sequence
  Description of Artificial Sequence: Synthetic oligonucleotide
agaaguucaaaagaaaguacua

SEQ ID NO: 6203 - RNA, 22 nt, Artificial Sequence
  Description of Artificial Sequence: Synthetic oligonucleotide
gaaguucaaaagaaaguacuac

SEQ ID NO: 6204 - RNA, 22 nt, Artificial Sequence
  Description of Artificial Sequence: Synthetic oligonucleotide
aaaagaaaguacuacuacucug

SEQ ID NO: 6205 - RNA, 22 nt, Artificial Sequence
  Description of Artificial Sequence: Synthetic oligonucleotide
aaagaaaguacuacuacucugu

SEQ ID NO: 6206 - RNA, 22 nt, Artificial Sequence
  Description of Artificial Sequence: Synthetic oligonucleotide
ucaaaagaaaguacuacuacuc

SEQ ID NO: 6207 - RNA, 22 nt, Artificial Sequence
  Description of Artificial Sequence: Synthetic oligonucleotide
caaaagaaaguacuacuacucu

SEQ ID NO: 6208 - RNA, 22 nt, Artificial Sequence
  Description of Artificial Sequence: Synthetic oligonucleotide
guucaaaagaaaguacuacuac

SEQ ID NO: 6209 - RNA, 22 nt, Artificial Sequence
  Description of Artificial Sequence: Synthetic oligonucleotide
uucaaaagaaaguacuacuacu

SEQ ID NO: 6210 - RNA, 22 nt, Artificial Sequence
  Description of Artificial Sequence: Synthetic oligonucleotide
aaguucaaaagaaaguacuacu

SEQ ID NO: 6211 - RNA, 22 nt, Artificial Sequence
  Description of Artificial Sequence: Synthetic oligonucleotide
aguucaaaagaaaguacuacua

SEQ ID NO: 6212 - RNA, 22 nt, Artificial Sequence
  Description of Artificial Sequence: Synthetic oligonucleotide
aauuuauaauuauaaucagcaa

SEQ ID NO: 6213 - RNA, 22 nt, Artificial Sequence
  Description of Artificial Sequence: Synthetic oligonucleotide
uagccacauucaaagacuucuu

SEQ ID NO: 6214 - RNA, 22 nt, Artificial Sequence
  Description of Artificial Sequence: Synthetic oligonucleotide
uuagccacauucaaagacuucu

SEQ ID NO: 6215 - RNA, 22 nt, Artificial Sequence
  Description of Artificial Sequence: Synthetic oligonucleotide
cccauuuauuagcuguauguac

SEQ ID NO: 6216 - RNA, 22 nt, Artificial Sequence
  Description of Artificial Sequence: Synthetic oligonucleotide
ucccauuuauuagcuguaugua

SEQ ID NO: 6217 - RNA, 22 nt, Artificial Sequence
  Description of Artificial Sequence: Synthetic oligonucleotide
ugucuauuggucauaguacuac

SEQ ID NO: 6218 - RNA, 22 nt, Artificial Sequence
  Description of Artificial Sequence: Synthetic oligonucleotide
cugucuauuggucauaguacua

SEQ ID NO: 6219 - RNA, 22 nt, Artificial Sequence
  Description of Artificial Sequence: Synthetic oligonucleotide
ucuauuggucauaguacuacag

SEQ ID NO: 6220 - RNA, 22 nt, Artificial Sequence
  Description of Artificial Sequence: Synthetic oligonucleotide
gucuauuggucauaguacuaca

SEQ ID NO: 6221 - RNA, 22 nt, Artificial Sequence
  Description of Artificial Sequence: Synthetic oligonucleotide
uauuggucauaguacuacagau

SEQ ID NO: 6222 - RNA, 22 nt, Artificial Sequence
  Description of Artificial Sequence: Synthetic oligonucleotide
cuauuggucauaguacuacaga

SEQ ID NO: 6223 - RNA, 22 nt, Artificial Sequence
  Description of Artificial Sequence: Synthetic oligonucleotide
uuggucauaguacuacagauag

SEQ ID NO: 6224 - RNA, 22 nt, Artificial Sequence
  Description of Artificial Sequence: Synthetic oligonucleotide
auuggucauaguacuacagaua

SEQ ID NO: 6225 - RNA, 22 nt, Artificial Sequence
  Description of Artificial Sequence: Synthetic oligonucleotide
ggucauaguacuacagauagag

SEQ ID NO: 6226 - RNA, 22 nt, Artificial Sequence
  Description of Artificial Sequence: Synthetic oligonucleotide
uggucauaguacuacagauaga

SEQ ID NO: 6227 - RNA, 22 nt, Artificial Sequence
  Description of Artificial Sequence: Synthetic oligonucleotide
aacccacagggucauuagcaca

SEQ ID NO: 6228 - RNA, 22 nt, Artificial Sequence
  Description of Artificial Sequence: Synthetic oligonucleotide
aaacccacagggucauuagcac

SEQ ID NO: 6229 - RNA, 22 nt, Artificial Sequence
  Description of Artificial Sequence: Synthetic oligonucleotide
aaaacccacagggucauuagca

SEQ ID NO: 6230 - RNA, 22 nt, Artificial Sequence
  Description of Artificial Sequence: Synthetic oligonucleotide
uaaaacccacagggucauuagc

SEQ ID NO: 6231 - RNA, 22 nt, Artificial Sequence
  Description of Artificial Sequence: Synthetic oligonucleotide
ccacagggucauuagcacaagu

SEQ ID NO: 6232 - RNA, 22 nt, Artificial Sequence
  Description of Artificial Sequence: Synthetic oligonucleotide
cccacagggucauuagcacaag

SEQ ID NO: 6233 - RNA, 22 nt, Artificial Sequence
  Description of Artificial Sequence: Synthetic oligonucleotide
acccacagggucauuagcacaa

SEQ ID NO: 6234 - RNA, 22 nt, Artificial Sequence
  Description of Artificial Sequence: Synthetic oligonucleotide
guaaaacccacagggucauuag

SEQ ID NO: 6235 - RNA, 22 nt, Artificial Sequence
  Description of Artificial Sequence: Synthetic oligonucleotide
uguaaaacccacagggucauua

SEQ ID NO: 6236 - RNA, 22 nt, Artificial Sequence
  Description of Artificial Sequence: Synthetic oligonucleotide
uagucgucgucgguucaucaua

SEQ ID NO: 6237 - RNA, 22 nt, Artificial Sequence
  Description of Artificial Sequence: Synthetic oligonucleotide
agucgucgucgguucaucauaa

SEQ ID NO: 6238 - RNA, 22 nt, Artificial Sequence
  Description of Artificial Sequence: Synthetic oligonucleotide
ucgucgguucaucauaaauugg

SEQ ID NO: 6239 - RNA, 22 nt, Artificial Sequence
  Description of Artificial Sequence: Synthetic oligonucleotide
gucgucgucgguucaucauaaa

SEQ ID NO: 6240 - RNA, 22 nt, Artificial Sequence
  Description of Artificial Sequence: Synthetic oligonucleotide
ucgucgucgguucaucauaaau

SEQ ID NO: 6241 - RNA, 22 nt, Artificial Sequence
  Description of Artificial Sequence: Synthetic oligonucleotide
cgucgucgguucaucauaaauu

SEQ ID NO: 6242 - RNA, 22 nt, Artificial Sequence
  Description of Artificial Sequence: Synthetic oligonucleotide
gucgucgguucaucauaaauug

SEQ ID NO: 6243 - RNA, 22 nt, Artificial Sequence
  Description of Artificial Sequence: Synthetic oligonucleotide
guagacuauauaucguaaacgg

SEQ ID NO: 6244 - RNA, 22 nt, Artificial Sequence
  Description of Artificial Sequence: Synthetic oligonucleotide
aguagacuauauaucguaaacg

SEQ ID NO: 6245 - RNA, 22 nt, Artificial Sequence
  Description of Artificial Sequence: Synthetic oligonucleotide
agacuauauaucguaaacggaa

SEQ ID NO: 6246 - RNA, 22 nt, Artificial Sequence
  Description of Artificial Sequence: Synthetic oligonucleotide
uagacuauauaucguaaacgga

SEQ ID NO: 6247 - RNA, 22 nt, Artificial Sequence
  Description of Artificial Sequence: Synthetic oligonucleotide
gggcaaauugugcaauuugcgg

SEQ ID NO: 6248 - RNA, 22 nt, Artificial Sequence
  Description of Artificial Sequence: Synthetic oligonucleotide
ggggcaaauugugcaauuugcg

SEQ ID NO: 6249 - RNA, 22 nt, Artificial Sequence
  Description of Artificial Sequence: Synthetic oligonucleotide
cacauaccgcagacgguacaga

SEQ ID NO: 6250 - RNA, 22 nt, Artificial Sequence
  Description of Artificial Sequence: Synthetic oligonucleotide
acauaccgcagacgguacagac

SEQ ID NO: 6251 - RNA, 22 nt, Artificial Sequence
  Description of Artificial Sequence: Synthetic oligonucleotide
uaccgcagacgguacagacugu

SEQ ID NO: 6252 - RNA, 22 nt, Artificial Sequence
  Description of Artificial Sequence: Synthetic oligonucleotide
cauuaacaauaguuguacauuc

SEQ ID NO: 6253 - RNA, 22 nt, Artificial Sequence
  Description of Artificial Sequence: Synthetic oligonucleotide
ccauuaacaauaguuguacauu

SEQ ID NO: 6254 - RNA, 22 nt, Artificial Sequence
  Description of Artificial Sequence: Synthetic oligonucleotide
gguuuaaaucaucagcaaauuu

SEQ ID NO: 6255 - RNA, 22 nt, Artificial Sequence
  Description of Artificial Sequence: Synthetic oligonucleotide
ugguuuaaaucaucagcaaauu

SEQ ID NO: 6256 - RNA, 22 nt, Artificial Sequence
  Description of Artificial Sequence: Synthetic oligonucleotide
cucugaguaaaguaaguuucag

SEQ ID NO: 6257 - RNA, 22 nt, Artificial Sequence
  Description of Artificial Sequence: Synthetic oligonucleotide
ucugaguaaaguaaguuucagg

SEQ ID NO: 6258 - RNA, 22 nt, Artificial Sequence
  Description of Artificial Sequence: Synthetic oligonucleotide
uuuauugaaauaaucaucauca

SEQ ID NO: 6259 - RNA, 22 nt, Artificial Sequence
  Description of Artificial Sequence: Synthetic oligonucleotide
uuauugaaauaaucaucaucac

SEQ ID NO: 6260 - RNA, 22 nt, Artificial Sequence
  Description of Artificial Sequence: Synthetic oligonucleotide
cacauuguugguagauuauaac

SEQ ID NO: 6261 - RNA, 22 nt, Artificial Sequence
  Description of Artificial Sequence: Synthetic oligonucleotide
acauuguugguagauuauaacg

SEQ ID NO: 6262 - RNA, 22 nt, Artificial Sequence
  Description of Artificial Sequence: Synthetic oligonucleotide
uuguugguagauuauaacgaua

SEQ ID NO: 6263 - RNA, 22 nt, Artificial Sequence
  Description of Artificial Sequence: Synthetic oligonucleotide
cauuguugguagauuauaacga

SEQ ID NO: 6264 - RNA, 22 nt, Artificial Sequence
  Description of Artificial Sequence: Synthetic oligonucleotide
auuguugguagauuauaacgau

SEQ ID NO: 6265 - RNA, 22 nt, Artificial Sequence
  Description of Artificial Sequence: Synthetic oligonucleotide
acggugcgagcucuauucuuug

SEQ ID NO: 6266 - RNA, 22 nt, Artificial Sequence
  Description of Artificial Sequence: Synthetic oligonucleotide
cggugcgagcucuauucuuugc

SEQ ID NO: 6267 - RNA, 22 nt, Artificial Sequence
  Description of Artificial Sequence: Synthetic oligonucleotide
agcucuauucuuugcacuaaug

SEQ ID NO: 6268 - RNA, 22 nt, Artificial Sequence
  Description of Artificial Sequence: Synthetic oligonucleotide
gcucuauucuuugcacuaaugg

SEQ ID NO: 6269 - RNA, 22 nt, Artificial Sequence
  Description of Artificial Sequence: Synthetic oligonucleotide
cgagcucuauucuuugcacuaa

SEQ ID NO: 6270 - RNA, 22 nt, Artificial Sequence
  Description of Artificial Sequence: Synthetic oligonucleotide
gagcucuauucuuugcacuaau

SEQ ID NO: 6271 - RNA, 22 nt, Artificial Sequence
  Description of Artificial Sequence: Synthetic oligonucleotide
ugcgagcucuauucuuugcacu

SEQ ID NO: 6272 - RNA, 22 nt, Artificial Sequence
  Description of Artificial Sequence: Synthetic oligonucleotide
gcgagcucuauucuuugcacua

SEQ ID NO: 6273 - RNA, 22 nt, Artificial Sequence
  Description of Artificial Sequence: Synthetic oligonucleotide
ggugcgagcucuauucuuugca

SEQ ID NO: 6274 - RNA, 22 nt, Artificial Sequence
  Description of Artificial Sequence: Synthetic oligonucleotide
gugcgagcucuauucuuugcac

SEQ ID NO: 6275 - RNA, 22 nt, Artificial Sequence
  Description of Artificial Sequence: Synthetic oligonucleotide
aaacauacggauuaacagacaa

SEQ ID NO: 6276 - RNA, 22 nt, Artificial Sequence
  Description of Artificial Sequence: Synthetic oligonucleotide
caaacauacggauuaacagaca

SEQ ID NO: 6277 - RNA, 22 nt, Artificial Sequence
  Description of Artificial Sequence: Synthetic oligonucleotide
ggauuaacagacaagacuaauu

SEQ ID NO: 6278 - RNA, 22 nt, Artificial Sequence
  Description of Artificial Sequence: Synthetic oligonucleotide
gcacacaauggaaaacuaaugg

SEQ ID NO: 6279 - RNA, 22 nt, Artificial Sequence
  Description of Artificial Sequence: Synthetic oligonucleotide
agcacacaauggaaaacuaaug

SEQ ID NO: 6280 - RNA, 22 nt, Artificial Sequence
  Description of Artificial Sequence: Synthetic oligonucleotide
uagcacacaauggaaaacuaau

SEQ ID NO: 6281 - RNA, 22 nt, Artificial Sequence
  Description of Artificial Sequence: Synthetic oligonucleotide
uuagcacacaauggaaaacuaa

SEQ ID NO: 6282 - RNA, 22 nt, Artificial Sequence
  Description of Artificial Sequence: Synthetic oligonucleotide
cacacaauggaaaacuaauggg

SEQ ID NO: 6283 - RNA, 22 nt, Artificial Sequence
  Description of Artificial Sequence: Synthetic oligonucleotide
uggucuguguuuaauuuauagu

SEQ ID NO: 6284 - RNA, 22 nt, Artificial Sequence
  Description of Artificial Sequence: Synthetic oligonucleotide
auuagcacacaauggaaaacua

SEQ ID NO: 6285 - RNA, 22 nt, Artificial Sequence
  Description of Artificial Sequence: Synthetic oligonucleotide
cauuagcacacaauggaaaacu

SEQ ID NO: 6286 - RNA, 22 nt, Artificial Sequence
  Description of Artificial Sequence: Synthetic oligonucleotide
uucugguucuagugugcccuua

SEQ ID NO: 6287 - RNA, 22 nt, Artificial Sequence
  Description of Artificial Sequence: Synthetic oligonucleotide
auucugguucuagugugcccuu

SEQ ID NO: 6288 - RNA, 22 nt, Artificial Sequence
  Description of Artificial Sequence: Synthetic oligonucleotide
cugguucuagugugcccuuagu

SEQ ID NO: 6289 - RNA, 22 nt, Artificial Sequence
  Description of Artificial Sequence: Synthetic oligonucleotide
acuagugguccaaaacuuguag

SEQ ID NO: 6290 - RNA, 22 nt, Artificial Sequence
  Description of Artificial Sequence: Synthetic oligonucleotide
cacuagugguccaaaacuugua

SEQ ID NO: 6291 - RNA, 22 nt, Artificial Sequence
  Description of Artificial Sequence: Synthetic oligonucleotide
uagugguccaaaacuuguaggu

SEQ ID NO: 6292 - RNA, 22 nt, Artificial Sequence
  Description of Artificial Sequence: Synthetic oligonucleotide
cuagugguccaaaacuuguagg

SEQ ID NO: 6293 - RNA, 22 nt, Artificial Sequence
  Description of Artificial Sequence: Synthetic oligonucleotide
agugguccaaaacuuguaggug

SEQ ID NO: 6294 - RNA, 22 nt, Artificial Sequence
  Description of Artificial Sequence: Synthetic oligonucleotide
gguccaaaacuuguagguggga

SEQ ID NO: 6295 - RNA, 22 nt, Artificial Sequence
  Description of Artificial Sequence: Synthetic oligonucleotide
ugguccaaaacuuguagguggg

SEQ ID NO: 6296 - RNA, 22 nt, Artificial Sequence
  Description of Artificial Sequence: Synthetic oligonucleotide
ucacuagugguccaaaacuugu

SEQ ID NO: 6297 - RNA, 22 nt, Artificial Sequence
  Description of Artificial Sequence: Synthetic oligonucleotide
cucacuagugguccaaaacuug

SEQ ID NO: 6298 - RNA, 22 nt, Artificial Sequence
  Description of Artificial Sequence: Synthetic oligonucleotide
aucaguacuagugccugugccg

SEQ ID NO: 6299 - RNA, 22 nt, Artificial Sequence
  Description of Artificial Sequence: Synthetic oligonucleotide
aaaccaaagcacucacaguguc

SEQ ID NO: 6300 - RNA, 22 nt, Artificial Sequence
  Description of Artificial Sequence: Synthetic oligonucleotide
uuuagaccagaagaucaggaac

SEQ ID NO: 6301 - RNA, 22 nt, Artificial Sequence
  Description of Artificial Sequence: Synthetic oligonucleotide
guuuagaccagaagaucaggaa

SEQ ID NO: 6302 - RNA, 22 nt, Artificial Sequence
  Description of Artificial Sequence: Synthetic oligonucleotide
gcugccuggaguugaauuucuu

SEQ ID NO: 6303 - RNA, 22 nt, Artificial Sequence
  Description of Artificial Sequence: Synthetic oligonucleotide
gugacagcuugacaaauguuaa

SEQ ID NO: 6304 - RNA, 22 nt, Artificial Sequence
  Description of Artificial Sequence: Synthetic oligonucleotide
guuugagcagaaagagguccua

SEQ ID NO: 6305 - RNA, 22 nt, Artificial Sequence
  Description of Artificial Sequence: Synthetic oligonucleotide
auaauaagcauaauuaaaacaa

SEQ ID NO: 6306 - RNA, 22 nt, Artificial Sequence
  Description of Artificial Sequence: Synthetic oligonucleotide
uaauaagcauaauuaaaacaag

SEQ ID NO: 6307 - RNA, 22 nt, Artificial Sequence
  Description of Artificial Sequence: Synthetic oligonucleotide
aauaagcauaauuaaaacaagg

SEQ ID NO: 6308 - RNA, 22 nt, Artificial Sequence
  Description of Artificial Sequence: Synthetic oligonucleotide
gauuaggauguuuaguaagugg

SEQ ID NO: 6309 - RNA, 22 nt, Artificial Sequence
  Description of Artificial Sequence: Synthetic oligonucleotide
auuaggauguuuaguaaguggg

SEQ ID NO: 6310 - RNA, 22 nt, Artificial Sequence
  Description of Artificial Sequence: Synthetic oligonucleotide
uuaggauguuuaguaagugggu

SEQ ID NO: 6311 - RNA, 22 nt, Artificial Sequence
  Description of Artificial Sequence: Synthetic oligonucleotide
uaggauguuuaguaagugggua

SEQ ID NO: 6312 - RNA, 22 nt, Artificial Sequence
  Description of Artificial Sequence: Synthetic oligonucleotide
ggauguuuaguaaguggguaag

SEQ ID NO: 6313 - RNA, 22 nt, Artificial Sequence
  Description of Artificial Sequence: Synthetic oligonucleotide
gauguuuaguaaguggguaagc

SEQ ID NO: 6314 - RNA, 22 nt, Artificial Sequence
  Description of Artificial Sequence: Synthetic oligonucleotide
auguuuaguaaguggguaagca

SEQ ID NO: 6315 - RNA, 22 nt, Artificial Sequence
  Description of Artificial Sequence: Synthetic oligonucleotide
cugauuaggauguuuaguaagu

SEQ ID NO: 6316 - RNA, 22 nt, Artificial Sequence
  Description of Artificial Sequence: Synthetic oligonucleotide
ugauuaggauguuuaguaagug

SEQ ID NO: 6317 - RNA, 22 nt, Artificial Sequence
  Description of Artificial Sequence: Synthetic oligonucleotide
uuugcaacauugcuagaaaacu

SEQ ID NO: 6318 - RNA, 22 nt, Artificial Sequence
  Description of Artificial Sequence: Synthetic oligonucleotide
aauuugcaacauugcuagaaaa

SEQ ID NO: 6319 - RNA, 22 nt, Artificial Sequence
  Description of Artificial Sequence: Synthetic oligonucleotide
auuugcaacauugcuagaaaac

SEQ ID NO: 6320 - RNA, 22 nt, Artificial Sequence
  Description of Artificial Sequence: Synthetic oligonucleotide
auaauuugcaacauugcuagaa

SEQ ID NO: 6321 - RNA, 22 nt, Artificial Sequence
  Description of Artificial Sequence: Synthetic oligonucleotide
ugauaauuugcaacauugcuag

SEQ ID NO: 6322 - RNA, 22 nt, Artificial Sequence
  Description of Artificial Sequence: Synthetic oligonucleotide
gauaauuugcaacauugcuaga

SEQ ID NO: 6323 - RNA, 22 nt, Artificial Sequence
  Description of Artificial Sequence: Synthetic oligonucleotide
uuugauaauuugcaacauugcu

SEQ ID NO: 6324 - RNA, 22 nt, Artificial Sequence
  Description of Artificial Sequence: Synthetic oligonucleotide
uugauaauuugcaacauugcua

SEQ ID NO: 6325 - RNA, 22 nt, Artificial Sequence
  Description of Artificial Sequence: Synthetic oligonucleotide
cuuaccaguaccaggugguccc

SEQ ID NO: 6326 - RNA, 22 nt, Artificial Sequence
  Description of Artificial Sequence: Synthetic oligonucleotide
caguaccagguggucccuggag

SEQ ID NO: 6327 - RNA, 22 nt, Artificial Sequence
  Description of Artificial Sequence: Synthetic oligonucleotide
aguaccagguggucccuggagu

SEQ ID NO: 6328 - RNA, 22 nt, Artificial Sequence
  Description of Artificial Sequence: Synthetic oligonucleotide
aacucauugaaucauaauaaag

SEQ ID NO: 6329 - RNA, 22 nt, Artificial Sequence
  Description of Artificial Sequence: Synthetic oligonucleotide
acucauugaaucauaauaaagu

SEQ ID NO: 6330 - RNA, 22 nt, Artificial Sequence
  Description of Artificial Sequence: Synthetic oligonucleotide
gaaucauaauaaagucuagccu

SEQ ID NO: 6331 - RNA, 22 nt, Artificial Sequence
  Description of Artificial Sequence: Synthetic oligonucleotide
aaucauaauaaagucuagccuu

SEQ ID NO: 6332 - RNA, 22 nt, Artificial Sequence
  Description of Artificial Sequence: Synthetic oligonucleotide
uugaaucauaauaaagucuagc

SEQ ID NO: 6333 - RNA, 22 nt, Artificial Sequence
  Description of Artificial Sequence: Synthetic oligonucleotide
ugaaucauaauaaagucuagcc

SEQ ID NO: 6334 - RNA, 22 nt, Artificial Sequence
  Description of Artificial Sequence: Synthetic oligonucleotide
cauugaaucauaauaaagucua

SEQ ID NO: 6335 - RNA, 22 nt, Artificial Sequence
  Description of Artificial Sequence: Synthetic oligonucleotide
auugaaucauaauaaagucuag

SEQ ID NO: 6336 - RNA, 22 nt, Artificial Sequence
  Description of Artificial Sequence: Synthetic oligonucleotide
cucauugaaucauaauaaaguc

SEQ ID NO: 6337 - RNA, 22 nt, Artificial Sequence
  Description of Artificial Sequence: Synthetic oligonucleotide
ucauugaaucauaauaaagucu

SEQ ID NO: 6338 - RNA, 22 nt, Artificial Sequence
  Description of Artificial Sequence: Synthetic oligonucleotide
ggugcaacuccuuuaucagaac

SEQ ID NO: 6339 - RNA, 22 nt, Artificial Sequence
  Description of Artificial Sequence: Synthetic oligonucleotide
gugcaacuccuuuaucagaacc

SEQ ID NO: 6340 - RNA, 22 nt, Artificial Sequence
  Description of Artificial Sequence: Synthetic oligonucleotide
uccuuuaucagaaccagcacca

SEQ ID NO: 6341 - RNA, 22 nt, Artificial Sequence
  Description of Artificial Sequence: Synthetic oligonucleotide
acuccuuuaucagaaccagcac

SEQ ID NO: 6342 - RNA, 22 nt, Artificial Sequence
  Description of Artificial Sequence: Synthetic oligonucleotide
cuccuuuaucagaaccagcacc

SEQ ID NO: 6343 - RNA, 22 nt, Artificial Sequence
  Description of Artificial Sequence: Synthetic oligonucleotide
caacuccuuuaucagaaccagc

SEQ ID NO: 6344 - RNA, 22 nt, Artificial Sequence
  Description of Artificial Sequence: Synthetic oligonucleotide
aacuccuuuaucagaaccagca

SEQ ID NO: 6345 - RNA, 22 nt, Artificial Sequence
  Description of Artificial Sequence: Synthetic oligonucleotide
ugcaacuccuuuaucagaacca

SEQ ID NO: 6346 - RNA, 22 nt, Artificial Sequence
  Description of Artificial Sequence: Synthetic oligonucleotide
gcaacuccuuuaucagaaccag

SEQ ID NO: 6347 - RNA, 22 nt, Artificial Sequence
  Description of Artificial Sequence: Synthetic oligonucleotide
uuaggcauggcucuaucacauu

SEQ ID NO: 6348 - RNA, 22 nt, Artificial Sequence
  Description of Artificial Sequence: Synthetic oligonucleotide
guuuaacuagcauuguauguug

SEQ ID NO: 6349 - RNA, 22 nt, Artificial Sequence
  Description of Artificial Sequence: Synthetic oligonucleotide
uguuuaacuagcauuguauguu

SEQ ID NO: 6350 - RNA, 22 nt, Artificial Sequence
  Description of Artificial Sequence: Synthetic oligonucleotide
ucaaaaguuguuaccacucuaa

SEQ ID NO: 6351 - RNA, 22 nt, Artificial Sequence
  Description of Artificial Sequence: Synthetic oligonucleotide
aucaaaaguuguuaccacucua

SEQ ID NO: 6352 - RNA, 22 nt, Artificial Sequence
  Description of Artificial Sequence: Synthetic oligonucleotide
aaaaguuguuaccacucuaaca

SEQ ID NO: 6353 - RNA, 22 nt, Artificial Sequence
  Description of Artificial Sequence: Synthetic oligonucleotide
caaaaguuguuaccacucuaac

SEQ ID NO: 6354 - RNA, 22 nt, Artificial Sequence
  Description of Artificial Sequence: Synthetic oligonucleotide
aaguuguuaccacucuaacaga

SEQ ID NO: 6355 - RNA, 22 nt, Artificial Sequence
  Description of Artificial Sequence: Synthetic oligonucleotide
aaaguuguuaccacucuaacag

SEQ ID NO: 6356 - RNA, 22 nt, Artificial Sequence
  Description of Artificial Sequence: Synthetic oligonucleotide
guuguuaccacucuaacagaac

SEQ ID NO: 6357 - RNA, 22 nt, Artificial Sequence
  Description of Artificial Sequence: Synthetic oligonucleotide
aguuguuaccacucuaacagaa

SEQ ID NO: 6358 - RNA, 22 nt, Artificial Sequence
  Description of Artificial Sequence: Synthetic oligonucleotide
uagcaggcauauagaccauauu

SEQ ID NO: 6359 - RNA, 22 nt, Artificial Sequence
  Description of Artificial Sequence: Synthetic oligonucleotide
uucagaaucaccauuagcaaca

SEQ ID NO: 6360 - RNA, 22 nt, Artificial Sequence
  Description of Artificial Sequence: Synthetic oligonucleotide
cuucagaaucaccauuagcaac

SEQ ID NO: 6361 - RNA, 22 nt, Artificial Sequence
  Description of Artificial Sequence: Synthetic oligonucleotide
aucaccauuagcaacagccugc

SEQ ID NO: 6362 - RNA, 22 nt, Artificial Sequence
  Description of Artificial Sequence: Synthetic oligonucleotide
aaucaccauuagcaacagccug

SEQ ID NO: 6363 - RNA, 22 nt, Artificial Sequence
  Description of Artificial Sequence: Synthetic oligonucleotide
caccauuagcaacagccugcuc

SEQ ID NO: 6364 - RNA, 22 nt, Artificial Sequence
  Description of Artificial Sequence: Synthetic oligonucleotide
ucaccauuagcaacagccugcu

SEQ ID NO: 6365 - RNA, 22 nt, Artificial Sequence
  Description of Artificial Sequence: Synthetic oligonucleotide
cagaaucaccauuagcaacagc

SEQ ID NO: 6366 - RNA, 22 nt, Artificial Sequence
  Description of Artificial Sequence: Synthetic oligonucleotide
ucagaaucaccauuagcaacag

SEQ ID NO: 6367 - RNA, 22 nt, Artificial Sequence
  Description of Artificial Sequence: Synthetic oligonucleotide
gaaucaccauuagcaacagccu

SEQ ID NO: 6368 - RNA, 22 nt, Artificial Sequence
  Description of Artificial Sequence: Synthetic oligonucleotide
agaaucaccauuagcaacagcc

SEQ ID NO: 6369 - RNA, 22 nt, Artificial Sequence
  Description of Artificial Sequence: Synthetic oligonucleotide
auaacucauugaaucauaauaa

SEQ ID NO: 6370 - RNA, 22 nt, Artificial Sequence
  Description of Artificial Sequence: Synthetic oligonucleotide
uaacucauugaaucauaauaaa

SEQ ID NO: 6371 - RNA, 22 nt, Artificial Sequence
  Description of Artificial Sequence: Synthetic oligonucleotide
ucauaacucauugaaucauaau

SEQ ID NO: 6372 - RNA, 22 nt, Artificial Sequence
  Description of Artificial Sequence: Synthetic oligonucleotide
cauaacucauugaaucauaaua

SEQ ID NO: 6373 - RNA, 22 nt, Artificial Sequence
  Description of Artificial Sequence: Synthetic oligonucleotide
ccucauaacucauugaaucaua

SEQ ID NO: 6374 - RNA, 22 nt, Artificial Sequence
  Description of Artificial Sequence: Synthetic oligonucleotide
cucauaacucauugaaucauaa

SEQ ID NO: 6375 - RNA, 22 nt, Artificial Sequence
  Description of Artificial Sequence: Synthetic oligonucleotide
auccucauaacucauugaauca

SEQ ID NO: 6376 - RNA, 22 nt, Artificial Sequence
  Description of Artificial Sequence: Synthetic oligonucleotide
uccucauaacucauugaaucau

SEQ ID NO: 6377 - RNA, 22 nt, Artificial Sequence
  Description of Artificial Sequence: Synthetic oligonucleotide
ugauccucauaacucauugaau

SEQ ID NO: 6378 - RNA, 22 nt, Artificial Sequence
  Description of Artificial Sequence: Synthetic oligonucleotide
gauccucauaacucauugaauc

SEQ ID NO: 6379 - RNA, 22 nt, Artificial Sequence
  Description of Artificial Sequence: Synthetic oligonucleotide
uuguugauaauguuguugagug

SEQ ID NO: 6380 - RNA, 22 nt, Artificial Sequence
  Description of Artificial Sequence: Synthetic oligonucleotide
gcauuguugauaauguuguuga

SEQ ID NO: 6381 - RNA, 22 nt, Artificial Sequence
  Description of Artificial Sequence: Synthetic oligonucleotide
cauuguugauaauguuguugag

SEQ ID NO: 6382 - RNA, 22 nt, Artificial Sequence
  Description of Artificial Sequence: Synthetic oligonucleotide
cccaucauagagaugagucuuc

SEQ ID NO: 6383 - RNA, 22 nt, Artificial Sequence
  Description of Artificial Sequence: Synthetic oligonucleotide
aacccaucauagagaugagucu

SEQ ID NO: 6384 - RNA, 22 nt, Artificial Sequence
  Description of Artificial Sequence: Synthetic oligonucleotide
acccaucauagagaugagucuu

SEQ ID NO: 6385 - RNA, 22 nt, Artificial Sequence
  Description of Artificial Sequence: Synthetic oligonucleotide
ccacguucccgaaggugugacu

SEQ ID NO: 6386 - RNA, 22 nt, Artificial Sequence
  Description of Artificial Sequence: Synthetic oligonucleotide
cacguucccgaaggugugacuu

SEQ ID NO: 6387 - RNA, 22 nt, Artificial Sequence
  Description of Artificial Sequence: Synthetic oligonucleotide
guucccgaaggugugacuucca

SEQ ID NO: 6388 - RNA, 22 nt, Artificial Sequence
  Description of Artificial Sequence: Synthetic oligonucleotide
acguucccgaaggugugacuuc

SEQ ID NO: 6389 - RNA, 22 nt, Artificial Sequence
  Description of Artificial Sequence: Synthetic oligonucleotide
cguucccgaaggugugacuucc

SEQ ID NO: 6390 - RNA, 22 nt, Artificial Sequence
  Description of Artificial Sequence: Synthetic oligonucleotide
cucaagcugguucaaucuguca

SEQ ID NO: 6391 - RNA, 22 nt, Artificial Sequence
  Description of Artificial Sequence: Synthetic oligonucleotide
ucaagcugguucaaucugucaa

SEQ ID NO: 6392 - RNA, 22 nt, Artificial Sequence
  Description of Artificial Sequence: Synthetic oligonucleotide
cugguucaaucugucaagcagc

SEQ ID NO: 6393 - RNA, 22 nt, Artificial Sequence
  Description of Artificial Sequence: Synthetic oligonucleotide
ugguucaaucugucaagcagca

SEQ ID NO: 6394 - RNA, 22 nt, Artificial Sequence
  Description of Artificial Sequence: Synthetic oligonucleotide
agcugguucaaucugucaagca

SEQ ID NO: 6395 - RNA, 22 nt, Artificial Sequence
  Description of Artificial Sequence: Synthetic oligonucleotide
gcugguucaaucugucaagcag

SEQ ID NO: 6396 - RNA, 22 nt, Artificial Sequence
  Description of Artificial Sequence: Synthetic oligonucleotide
caagcugguucaaucugucaag

SEQ ID NO: 6397 - RNA, 22 nt, Artificial Sequence
  Description of Artificial Sequence: Synthetic oligonucleotide
aagcugguucaaucugucaagc

SEQ ID NO: 6398 - RNA, 22 nt, Artificial Sequence
  Description of Artificial Sequence: Synthetic oligonucleotide
uaacaacaucaaaagguguaaa

SEQ ID NO: 6399 - RNA, 22 nt, Artificial Sequence
  Description of Artificial Sequence: Synthetic oligonucleotide
agacgggcugcacuuacaccgc

SEQ ID NO: 6400 - RNA, 22 nt, Artificial Sequence
  Description of Artificial Sequence: Synthetic oligonucleotide
aagacgggcugcacuuacaccg

SEQ ID NO: 6401 - RNA, 22 nt, Artificial Sequence
  Description of Artificial Sequence: Synthetic oligonucleotide
gggcugcacuuacaccgcaaac

SEQ ID NO: 6402 - RNA, 22 nt, Artificial Sequence
  Description of Artificial Sequence: Synthetic oligonucleotide
cgggcugcacuuacaccgcaaa

SEQ ID NO: 6403 - RNA, 22 nt, Artificial Sequence
  Description of Artificial Sequence: Synthetic oligonucleotide
acgggcugcacuuacaccgcaa

SEQ ID NO: 6404 - RNA, 22 nt, Artificial Sequence
  Description of Artificial Sequence: Synthetic oligonucleotide
gacgggcugcacuuacaccgca

SEQ ID NO: 6405 - RNA, 22 nt, Artificial Sequence
  Description of Artificial Sequence: Synthetic oligonucleotide
ugcacuuacaccgcaaacccgu

SEQ ID NO: 6406 - RNA, 22 nt, Artificial Sequence
  Description of Artificial Sequence: Synthetic oligonucleotide
cugcacuuacaccgcaaacccg

SEQ ID NO: 6407 - RNA, 22 nt, Artificial Sequence
  Description of Artificial Sequence: Synthetic oligonucleotide
gcugcacuuacaccgcaaaccc

SEQ ID NO: 6408 - RNA, 22 nt, Artificial Sequence
  Description of Artificial Sequence: Synthetic oligonucleotide
ggcugcacuuacaccgcaaacc

SEQ ID NO: 6409 - RNA, 22 nt, Artificial Sequence
  Description of Artificial Sequence: Synthetic oligonucleotide
agaucuugauuaucuaauguca

SEQ ID NO: 6410 - RNA, 22 nt, Artificial Sequence
  Description of Artificial Sequence: Synthetic oligonucleotide
ugaaacaucuguugucacuuac

SEQ ID NO: 6411 - RNA, 22 nt, Artificial Sequence
  Description of Artificial Sequence: Synthetic oligonucleotide
augaaacaucuguugucacuua

SEQ ID NO: 6412 - RNA, 22 nt, Artificial Sequence
  Description of Artificial Sequence: Synthetic oligonucleotide
aaacaucuguugucacuuacug

SEQ ID NO: 6413 - RNA, 22 nt, Artificial Sequence
  Description of Artificial Sequence: Synthetic oligonucleotide
gaaacaucuguugucacuuacu

SEQ ID NO: 6414 - RNA, 22 nt, Artificial Sequence
  Description of Artificial Sequence: Synthetic oligonucleotide
gagaugaaacaucuguugucac

SEQ ID NO: 6415 - RNA, 22 nt, Artificial Sequence
  Description of Artificial Sequence: Synthetic oligonucleotide
cgagaugaaacaucuguuguca

SEQ ID NO: 6416 - RNA, 22 nt, Artificial Sequence
  Description of Artificial Sequence: Synthetic oligonucleotide
gaugaaacaucuguugucacuu

SEQ ID NO: 6417 - RNA, 22 nt, Artificial Sequence
  Description of Artificial Sequence: Synthetic oligonucleotide
agaugaaacaucuguugucacu

SEQ ID NO: 6418 - RNA, 22 nt, Artificial Sequence
  Description of Artificial Sequence: Synthetic oligonucleotide
acgagaugaaacaucuguuguc

SEQ ID NO: 6419 - RNA, 22 nt, Artificial Sequence
  Description of Artificial Sequence: Synthetic oligonucleotide
aacgagaugaaacaucuguugu

SEQ ID NO: 6420 - RNA, 22 nt, Artificial Sequence
  Description of Artificial Sequence: Synthetic oligonucleotide
gguaauugagcagggucgccaa

SEQ ID NO: 6421 - RNA, 22 nt, Artificial Sequence
  Description of Artificial Sequence: Synthetic oligonucleotide
guaauugagcagggucgccaau

SEQ ID NO: 6422 - RNA, 22 nt, Artificial Sequence
  Description of Artificial Sequence: Synthetic oligonucleotide
agagcuauguaaguuuacaucc

SEQ ID NO: 6423 - RNA, 22 nt, Artificial Sequence
  Description of Artificial Sequence: Synthetic oligonucleotide
gagcuauguaaguuuacauccu

SEQ ID NO: 6424 - RNA, 22 nt, Artificial Sequence
  Description of Artificial Sequence: Synthetic oligonucleotide
guaaguuuacauccugauuaug

SEQ ID NO: 6425 - RNA, 22 nt, Artificial Sequence
  Description of Artificial Sequence: Synthetic oligonucleotide
uaaguuuacauccugauuaugu

SEQ ID NO: 6426 - RNA, 22 nt, Artificial Sequence
  Description of Artificial Sequence: Synthetic oligonucleotide
auguaaguuuacauccugauua

SEQ ID NO: 6427 - RNA, 22 nt, Artificial Sequence
  Description of Artificial Sequence: Synthetic oligonucleotide
uguaaguuuacauccugauuau

SEQ ID NO: 6428 - RNA, 22 nt, Artificial Sequence
  Description of Artificial Sequence: Synthetic oligonucleotide
cuauguaaguuuacauccugau

SEQ ID NO: 6429 - RNA, 22 nt, Artificial Sequence
  Description of Artificial Sequence: Synthetic oligonucleotide
uauguaaguuuacauccugauu

SEQ ID NO: 6430 - RNA, 22 nt, Artificial Sequence
  Description of Artificial Sequence: Synthetic oligonucleotide
agcuauguaaguuuacauccug

SEQ ID NO: 6431 - RNA, 22 nt, Artificial Sequence
  Description of Artificial Sequence: Synthetic oligonucleotide
gcuauguaaguuuacauccuga

SEQ ID NO: 6432 - RNA, 22 nt, Artificial Sequence
  Description of Artificial Sequence: Synthetic oligonucleotide
agggcucuuccauauaggcagc

SEQ ID NO: 6433 - RNA, 22 nt, Artificial Sequence
  Description of Artificial Sequence: Synthetic oligonucleotide
gggcucuuccauauaggcagcu

SEQ ID NO: 6434 - RNA, 22 nt, Artificial Sequence
  Description of Artificial Sequence: Synthetic oligonucleotide
ggcucuuccauauaggcagcuc

SEQ ID NO: 6435 - RNA, 22 nt, Artificial Sequence
  Description of Artificial Sequence: Synthetic oligonucleotide
gcucuuccauauaggcagcucu

SEQ ID NO: 6436 - RNA, 22 nt, Artificial Sequence
  Description of Artificial Sequence: Synthetic oligonucleotide
cauuagggcucuuccauauagg

SEQ ID NO: 6437 - RNA, 22 nt, Artificial Sequence
  Description of Artificial Sequence: Synthetic oligonucleotide
auuagggcucuuccauauaggc

SEQ ID NO: 6438 - RNA, 22 nt, Artificial Sequence
  Description of Artificial Sequence: Synthetic oligonucleotide
uuagggcucuuccauauaggca

SEQ ID NO: 6439 - RNA, 22 nt, Artificial Sequence
  Description of Artificial Sequence: Synthetic oligonucleotide
uagggcucuuccauauaggcag

SEQ ID NO: 6440 - RNA, 22 nt, Artificial Sequence
  Description of Artificial Sequence: Synthetic oligonucleotide
cacauuagggcucuuccauaua

SEQ ID NO: 6441 - RNA, 22 nt, Artificial Sequence
  Description of Artificial Sequence: Synthetic oligonucleotide
aaaacagcaagaagugcaacgc

SEQ ID NO: 6442 - RNA, 22 nt, Artificial Sequence
  Description of Artificial Sequence: Synthetic oligonucleotide
aaacagcaagaagugcaacgcc

SEQ ID NO: 6443 - RNA, 22 nt, Artificial Sequence
  Description of Artificial Sequence: Synthetic oligonucleotide
uuaguagcagcaagauuagcag

SEQ ID NO: 6444 - RNA, 22 nt, Artificial Sequence
  Description of Artificial Sequence: Synthetic oligonucleotide
cucagcagcagauuucuuagug

SEQ ID NO: 6445 - RNA, 22 nt, Artificial Sequence
  Description of Artificial Sequence: Synthetic oligonucleotide
ccucagcagcagauuucuuagu

SEQ ID NO: 6446 - RNA, 22 nt, Artificial Sequence
  Description of Artificial Sequence: Synthetic oligonucleotide
cagcagcagauuucuuagugac

SEQ ID NO: 6447 - RNA, 22 nt, Artificial Sequence
  Description of Artificial Sequence: Synthetic oligonucleotide
ucagcagcagauuucuuaguga

SEQ ID NO: 6448 - RNA, 22 nt, Artificial Sequence
  Description of Artificial Sequence: Synthetic oligonucleotide
gcagcagauuucuuagugacag

SEQ ID NO: 6449 - RNA, 22 nt, Artificial Sequence
  Description of Artificial Sequence: Synthetic oligonucleotide
agcagauuucuuagugacaguu

SEQ ID NO: 6450 - RNA, 22 nt, Artificial Sequence
  Description of Artificial Sequence: Synthetic oligonucleotide
cagcagauuucuuagugacagu

SEQ ID NO: 6451 - RNA, 22 nt, Artificial Sequence
  Description of Artificial Sequence: Synthetic oligonucleotide
gccucagcagcagauuucuuag

SEQ ID NO: 6452 - RNA, 22 nt, Artificial Sequence
  Description of Artificial Sequence: Synthetic oligonucleotide
agccucagcagcagauuucuua

SEQ ID NO: 6453 - RNA, 22 nt, Artificial Sequence
  Description of Artificial Sequence: Synthetic oligonucleotide
agcagcaagauuagcagaagcu

SEQ ID NO: 6454 - RNA, 22 nt, Artificial Sequence
  Description of Artificial Sequence: Synthetic oligonucleotide
uagcagcaagauuagcagaagc

SEQ ID NO: 6455 - RNA, 22 nt, Artificial Sequence
  Description of Artificial Sequence: Synthetic oligonucleotide
guagcagcaagauuagcagaag

SEQ ID NO: 6456 - RNA, 22 nt, Artificial Sequence
  Description of Artificial Sequence: Synthetic oligonucleotide
aguagcagcaagauuagcagaa

SEQ ID NO: 6457 - RNA, 22 nt, Artificial Sequence
  Description of Artificial Sequence: Synthetic oligonucleotide
gcuugacaaauguuaaaaacac

SEQ ID NO: 6458 - RNA, 22 nt, Artificial Sequence
  Description of Artificial Sequence: Synthetic oligonucleotide
agcuugacaaauguuaaaaaca

SEQ ID NO: 6459 - RNA, 22 nt, Artificial Sequence
  Description of Artificial Sequence: Synthetic oligonucleotide
cagcuugacaaauguuaaaaac

SEQ ID NO: 6460 - RNA, 22 nt, Artificial Sequence
  Description of Artificial Sequence: Synthetic oligonucleotide
acagcuugacaaauguuaaaaa

SEQ ID NO: 6461 - RNA, 22 nt, Artificial Sequence
  Description of Artificial Sequence: Synthetic oligonucleotide
cuugacaaauguuaaaaacacu

SEQ ID NO: 6462 - RNA, 22 nt, Artificial Sequence
  Description of Artificial Sequence: Synthetic oligonucleotide
ugacagcuugacaaauguuaaa

SEQ ID NO: 6463 - RNA, 22 nt, Artificial Sequence
  Description of Artificial Sequence: Synthetic oligonucleotide
guuccaucacucuuagggaauc

SEQ ID NO: 6464 - RNA, 22 nt, Artificial Sequence
  Description of Artificial Sequence: Synthetic oligonucleotide
caucacucuuagggaaucuagc

SEQ ID NO: 6465 - RNA, 22 nt, Artificial Sequence
  Description of Artificial Sequence: Synthetic oligonucleotide
ccaucacucuuagggaaucuag

SEQ ID NO: 6466 - RNA, 22 nt, Artificial Sequence
  Description of Artificial Sequence: Synthetic oligonucleotide
uccaucacucuuagggaaucua

SEQ ID NO: 6467 - RNA, 22 nt, Artificial Sequence
  Description of Artificial Sequence: Synthetic oligonucleotide
uuccaucacucuuagggaaucu

SEQ ID NO: 6468 - RNA, 22 nt, Artificial Sequence
  Description of Artificial Sequence: Synthetic oligonucleotide
gauaauaaagaacugacuuaaa

SEQ ID NO: 6469 - RNA, 22 nt, Artificial Sequence
  Description of Artificial Sequence: Synthetic oligonucleotide
auaauaaagaacugacuuaaag

SEQ ID NO: 6470 - RNA, 22 nt, Artificial Sequence
  Description of Artificial Sequence: Synthetic oligonucleotide
uugauaauaaagaacugacuua

SEQ ID NO: 6471 - RNA, 22 nt, Artificial Sequence
  Description of Artificial Sequence: Synthetic oligonucleotide
ugauaauaaagaacugacuuaa

SEQ ID NO: 6472 - RNA, 22 nt, Artificial Sequence
  Description of Artificial Sequence: Synthetic oligonucleotide
guuagcauuaauacagccacca

SEQ ID NO: 6473 - RNA, 22 nt, Artificial Sequence
  Description of Artificial Sequence: Synthetic oligonucleotide
uuagcauuaauacagccaccau

SEQ ID NO: 6474 - RNA, 22 nt, Artificial Sequence
  Description of Artificial Sequence: Synthetic oligonucleotide
ugguuagcauuaauacagccac

SEQ ID NO: 6475 - RNA, 22 nt, Artificial Sequence
  Description of Artificial Sequence: Synthetic oligonucleotide
gguuagcauuaauacagccacc

SEQ ID NO: 6476 - RNA, 22 nt, Artificial Sequence
  Description of Artificial Sequence: Synthetic oligonucleotide
cuugguuagcauuaauacagcc

SEQ ID NO: 6477 - RNA, 22 nt, Artificial Sequence
  Description of Artificial Sequence: Synthetic oligonucleotide
uugguuagcauuaauacagcca

SEQ ID NO: 6478 - RNA, 22 nt, Artificial Sequence
  Description of Artificial Sequence: Synthetic oligonucleotide
acuugguuagcauuaauacagc

SEQ ID NO: 6479 - RNA, 22 nt, Artificial Sequence
  Description of Artificial Sequence: Synthetic oligonucleotide
uccgcguggccucggugaaaau

SEQ ID NO: 6480 - RNA, 22 nt, Artificial Sequence
  Description of Artificial Sequence: Synthetic oligonucleotide
cuccgcguggccucggugaaaa

SEQ ID NO: 6481 - RNA, 22 nt, Artificial Sequence
  Description of Artificial Sequence: Synthetic oligonucleotide
cgcguggccucggugaaaaugu

SEQ ID NO: 6482 - RNA, 22 nt, Artificial Sequence
  Description of Artificial Sequence: Synthetic oligonucleotide
ccgcguggccucggugaaaaug

SEQ ID NO: 6483 - RNA, 22 nt, Artificial Sequence
  Description of Artificial Sequence: Synthetic oligonucleotide
cguggccucggugaaaaugugg

SEQ ID NO: 6484 - RNA, 22 nt, Artificial Sequence
  Description of Artificial Sequence: Synthetic oligonucleotide
gcguggccucggugaaaaugug

SEQ ID NO: 6485 - RNA, 22 nt, Artificial Sequence
  Description of Artificial Sequence: Synthetic oligonucleotide
uggccucggugaaaauguggug

SEQ ID NO: 6486 - RNA, 22 nt, Artificial Sequence
  Description of Artificial Sequence: Synthetic oligonucleotide
guggccucggugaaaauguggu

SEQ ID NO: 6487 - RNA, 22 nt, Artificial Sequence
  Description of Artificial Sequence: Synthetic oligonucleotide
acuccgcguggccucggugaaa

SEQ ID NO: 6488 - RNA, 22 nt, Artificial Sequence
  Description of Artificial Sequence: Synthetic oligonucleotide
uacuccgcguggccucggugaa

SEQ ID NO: 6489 - RNA, 22 nt, Artificial Sequence
  Description of Artificial Sequence: Synthetic oligonucleotide
uucaacgguaauaguaccguug

SEQ ID NO: 6490 - RNA, 22 nt, Artificial Sequence
  Description of Artificial Sequence: Synthetic oligonucleotide
cuucaacgguaauaguaccguu

SEQ ID NO: 6491 - RNA, 22 nt, Artificial Sequence
  Description of Artificial Sequence: Synthetic oligonucleotide
ucuucaacgguaauaguaccgu

SEQ ID NO: 6492 - RNA, 22 nt, Artificial Sequence
  Description of Artificial Sequence: Synthetic oligonucleotide
gcucuucaacgguaauaguacc

SEQ ID NO: 6493 - RNA, 22 nt, Artificial Sequence
  Description of Artificial Sequence: Synthetic oligonucleotide
agcucuucaacgguaauaguac

SEQ ID NO: 6494 - RNA, 22 nt, Artificial Sequence
  Description of Artificial Sequence: Synthetic oligonucleotide
aagcucuucaacgguaauagua

SEQ ID NO: 6495 - RNA, 22 nt, Artificial Sequence
  Description of Artificial Sequence: Synthetic oligonucleotide
uaagcucuucaacgguaauagu

SEQ ID NO: 6496 - RNA, 22 nt, Artificial Sequence
  Description of Artificial Sequence: Synthetic oligonucleotide
uuaagcucuucaacgguaauag

SEQ ID NO: 6497 - RNA, 22 nt, Artificial Sequence
  Description of Artificial Sequence: Synthetic oligonucleotide
uuuaagcucuucaacgguaaua

SEQ ID NO: 6498 - RNA, 22 nt, Artificial Sequence
  Description of Artificial Sequence: Synthetic oligonucleotide
aaauggcuugaucuaaagcauu

SEQ ID NO: 6499 - RNA, 22 nt, Artificial Sequence
  Description of Artificial Sequence: Synthetic oligonucleotide
gaaauggcuugaucuaaagcau

SEQ ID NO: 6500 - RNA, 22 nt, Artificial Sequence
  Description of Artificial Sequence: Synthetic oligonucleotide
auggcuugaucuaaagcauuac

SEQ ID NO: 6501 - RNA, 22 nt, Artificial Sequence
  Description of Artificial Sequence: Synthetic oligonucleotide
aauggcuugaucuaaagcauua

SEQ ID NO: 6502 - RNA, 22 nt, Artificial Sequence
  Description of Artificial Sequence: Synthetic oligonucleotide
ggcuugaucuaaagcauuacca

SEQ ID NO: 6503 - RNA, 22 nt, Artificial Sequence
  Description of Artificial Sequence: Synthetic oligonucleotide
uggcuugaucuaaagcauuacc

SEQ ID NO: 6504 - RNA, 22 nt, Artificial Sequence
  Description of Artificial Sequence: Synthetic oligonucleotide
cuugaucuaaagcauuaccaua

SEQ ID NO: 6505 - RNA, 22 nt, Artificial Sequence
  Description of Artificial Sequence: Synthetic oligonucleotide
gcuugaucuaaagcauuaccau

SEQ ID NO: 6506 - RNA, 22 nt, Artificial Sequence
  Description of Artificial Sequence: Synthetic oligonucleotide
ggaaauggcuugaucuaaagca

SEQ ID NO: 6507 - RNA, 22 nt, Artificial Sequence
  Description of Artificial Sequence: Synthetic oligonucleotide
uggaaauggcuugaucuaaagc

SEQ ID NO: 6508 - RNA, 22 nt, Artificial Sequence
  Description of Artificial Sequence: Synthetic oligonucleotide
ugguagcucuucgguaguagcc

SEQ ID NO: 6509 - RNA, 22 nt, Artificial Sequence
  Description of Artificial Sequence: Synthetic oligonucleotide
cugguagcucuucgguaguagc

SEQ ID NO: 6510 - RNA, 22 nt, Artificial Sequence
  Description of Artificial Sequence: Synthetic oligonucleotide
ucugguagcucuucgguaguag

SEQ ID NO: 6511 - RNA, 22 nt, Artificial Sequence
  Description of Artificial Sequence: Synthetic oligonucleotide
gucugguagcucuucgguagua

SEQ ID NO: 6512 - RNA, 22 nt, Artificial Sequence
  Description of Artificial Sequence: Synthetic oligonucleotide
agcucuucgguaguagccaauu

SEQ ID NO: 6513 - RNA, 22 nt, Artificial Sequence
  Description of Artificial Sequence: Synthetic oligonucleotide
uagcucuucgguaguagccaau

SEQ ID NO: 6514 - RNA, 22 nt, Artificial Sequence
  Description of Artificial Sequence: Synthetic oligonucleotide
guagcucuucgguaguagccaa

SEQ ID NO: 6515 - RNA, 22 nt, Artificial Sequence
  Description of Artificial Sequence: Synthetic oligonucleotide
gguagcucuucgguaguagcca

SEQ ID NO: 6516 - RNA, 22 nt, Artificial Sequence
  Description of Artificial Sequence: Synthetic oligonucleotide
cgucugguagcucuucgguagu

SEQ ID NO: 6517 - RNA, 22 nt, Artificial Sequence
  Description of Artificial Sequence: Synthetic oligonucleotide
ucgucugguagcucuucgguag

SEQ ID NO: 6518 - RNA, 22 nt, Artificial Sequence
  Description of Artificial Sequence: Synthetic oligonucleotide
acauacuguucuaauguugaau

SEQ ID NO: 6519 - RNA, 22 nt, Artificial Sequence
  Description of Artificial Sequence: Synthetic oligonucleotide
auacuguucuaauguugaauuc

SEQ ID NO: 6520 - RNA, 22 nt, Artificial Sequence
  Description of Artificial Sequence: Synthetic oligonucleotide
cauacuguucuaauguugaauu

SEQ ID NO: 6521 - RNA, 22 nt, Artificial Sequence
  Description of Artificial Sequence: Synthetic oligonucleotide
gguguguaggugccuguguagg

SEQ ID NO: 6522 - RNA, 22 nt, Artificial Sequence
  Description of Artificial Sequence: Synthetic oligonucleotide
guguguaggugccuguguagga

SEQ ID NO: 6523 - RNA, 22 nt, Artificial Sequence
  Description of Artificial Sequence: Synthetic oligonucleotide
uguguaggugccuguguaggau

SEQ ID NO: 6524 - RNA, 22 nt, Artificial Sequence
  Description of Artificial Sequence: Synthetic oligonucleotide
guguaggugccuguguaggaug

SEQ ID NO: 6525 - RNA, 22 nt, Artificial Sequence
  Description of Artificial Sequence: Synthetic oligonucleotide
uguaggugccuguguaggaugu

SEQ ID NO: 6526 - RNA, 22 nt, Artificial Sequence
  Description of Artificial Sequence: Synthetic oligonucleotide
guaggugccuguguaggaugua

SEQ ID NO: 6527 - RNA, 22 nt, Artificial Sequence
  Description of Artificial Sequence: Synthetic oligonucleotide
auaauucuacuacauuuaucua

SEQ ID NO: 6528 - RNA, 22 nt, Artificial Sequence
  Description of Artificial Sequence: Synthetic oligonucleotide
uauaauucuacuacauuuaucu

SEQ ID NO: 6529 - RNA, 22 nt, Artificial Sequence
  Description of Artificial Sequence: Synthetic oligonucleotide
auuucaagacuuguaaauugca

SEQ ID NO: 6530 - RNA, 22 nt, Artificial Sequence
  Description of Artificial Sequence: Synthetic oligonucleotide
uuuaggcucuguuggugggaau

SEQ ID NO: 6531 - RNA, 22 nt, Artificial Sequence
  Description of Artificial Sequence: Synthetic oligonucleotide
guauaauucuacuacauuuauc

SEQ ID NO: 6532 - RNA, 22 nt, Artificial Sequence
  Description of Artificial Sequence: Synthetic oligonucleotide
gguauaauucuacuacauuuau

SEQ ID NO: 6533 - RNA, 22 nt, Artificial Sequence
  Description of Artificial Sequence: Synthetic oligonucleotide
uuucuucauguugguaguuaga

SEQ ID NO: 6534 - RNA, 22 nt, Artificial Sequence
  Description of Artificial Sequence: Synthetic oligonucleotide
guuucuucauguugguaguuag

SEQ ID NO: 6535 - RNA, 22 nt, Artificial Sequence
  Description of Artificial Sequence: Synthetic oligonucleotide
ucuucauguugguaguuagaga

SEQ ID NO: 6536 - RNA, 22 nt, Artificial Sequence
  Description of Artificial Sequence: Synthetic oligonucleotide
cagccaccaucguaacaaucaa

SEQ ID NO: 6537 - RNA, 22 nt, Artificial Sequence
  Description of Artificial Sequence: Synthetic oligonucleotide
acagccaccaucguaacaauca

SEQ ID NO: 6538 - RNA, 22 nt, Artificial Sequence
  Description of Artificial Sequence: Synthetic oligonucleotide
caccaucguaacaaucaaagua

SEQ ID NO: 6539 - RNA, 22 nt, Artificial Sequence
  Description of Artificial Sequence: Synthetic oligonucleotide
ccaccaucguaacaaucaaagu

SEQ ID NO: 6540 - RNA, 22 nt, Artificial Sequence
  Description of Artificial Sequence: Synthetic oligonucleotide
gccaccaucguaacaaucaaag

SEQ ID NO: 6541 - RNA, 22 nt, Artificial Sequence
  Description of Artificial Sequence: Synthetic oligonucleotide
agccaccaucguaacaaucaaa

SEQ ID NO: 6542 - RNA, 22 nt, Artificial Sequence
  Description of Artificial Sequence: Synthetic oligonucleotide
aucguaacaaucaaaguacuua

SEQ ID NO: 6543 - RNA, 22 nt, Artificial Sequence
  Description of Artificial Sequence: Synthetic oligonucleotide
caucguaacaaucaaaguacuu

SEQ ID NO: 6544 - RNA, 22 nt, Artificial Sequence
  Description of Artificial Sequence: Synthetic oligonucleotide
ccaucguaacaaucaaaguacu

SEQ ID NO: 6545 - RNA, 22 nt, Artificial Sequence
  Description of Artificial Sequence: Synthetic oligonucleotide
accaucguaacaaucaaaguac

SEQ ID NO: 6546 - RNA, 22 nt, Artificial Sequence
  Description of Artificial Sequence: Synthetic oligonucleotide
acagcaaagucauagaagucuu

SEQ ID NO: 6547 - RNA, 22 nt, Artificial Sequence
  Description of Artificial Sequence: Synthetic oligonucleotide
guaaacaacagcaucaccauag

SEQ ID NO: 6548 - RNA, 22 nt, Artificial Sequence
  Description of Artificial Sequence: Synthetic oligonucleotide
uauuaacguaccugucucuucc

SEQ ID NO: 6549 - RNA, 22 nt, Artificial Sequence
  Description of Artificial Sequence: Synthetic oligonucleotide
gguggugcugacaucauaacaa

SEQ ID NO: 6550 - RNA, 22 nt, Artificial Sequence
  Description of Artificial Sequence: Synthetic oligonucleotide
aacuacagccauaaccuuucca

SEQ ID NO: 6551 - RNA, 22 nt, Artificial Sequence
  Description of Artificial Sequence: Synthetic oligonucleotide
caacuacagccauaaccuuucc

SEQ ID NO: 6552 - RNA, 22 nt, Artificial Sequence
  Description of Artificial Sequence: Synthetic oligonucleotide
acaacuacagccauaaccuuuc

SEQ ID NO: 6553 - RNA, 22 nt, Artificial Sequence
  Description of Artificial Sequence: Synthetic oligonucleotide
cacaacuacagccauaaccuuu

SEQ ID NO: 6554 - RNA, 22 nt, Artificial Sequence
  Description of Artificial Sequence: Synthetic oligonucleotide
acagccauaaccuuuccacaua

SEQ ID NO: 6555 - RNA, 22 nt, Artificial Sequence
  Description of Artificial Sequence: Synthetic oligonucleotide
uacagccauaaccuuuccacau

SEQ ID NO: 6556 - RNA, 22 nt, Artificial Sequence
  Description of Artificial Sequence: Synthetic oligonucleotide
cuacagccauaaccuuuccaca

SEQ ID NO: 6557 - RNA, 22 nt, Artificial Sequence
  Description of Artificial Sequence: Synthetic oligonucleotide
acuacagccauaaccuuuccac

SEQ ID NO: 6558 - RNA, 22 nt, Artificial Sequence
  Description of Artificial Sequence: Synthetic oligonucleotide
ucacaacuacagccauaaccuu

SEQ ID NO: 6559 - RNA, 22 nt, Artificial Sequence
  Description of Artificial Sequence: Synthetic oligonucleotide
aucacaacuacagccauaaccu

SEQ ID NO: 6560 - RNA, 22 nt, Artificial Sequence
  Description of Artificial Sequence: Synthetic oligonucleotide
gagcaaaauucaugagguccuu

SEQ ID NO: 6561 - RNA, 22 nt, Artificial Sequence
  Description of Artificial Sequence: Synthetic oligonucleotide
agcaaaauucaugagguccuuu

SEQ ID NO: 6562 - RNA, 22 nt, Artificial Sequence
  Description of Artificial Sequence: Synthetic oligonucleotide
aaaauucaugagguccuuuagu

SEQ ID NO: 6563 - RNA, 22 nt, Artificial Sequence
  Description of Artificial Sequence: Synthetic oligonucleotide
aaauucaugagguccuuuagua

SEQ ID NO: 6564 - RNA, 22 nt, Artificial Sequence
  Description of Artificial Sequence: Synthetic oligonucleotide
gcaaaauucaugagguccuuua

SEQ ID NO: 6565 - RNA, 22 nt, Artificial Sequence
  Description of Artificial Sequence: Synthetic oligonucleotide
caaaauucaugagguccuuuag

SEQ ID NO: 6566 - RNA, 22 nt, Artificial Sequence
  Description of Artificial Sequence: Synthetic oligonucleotide
caacacgcuuaacaaagcacuc

SEQ ID NO: 6567 - RNA, 22 nt, Artificial Sequence
  Description of Artificial Sequence: Synthetic oligonucleotide
ucaacacgcuuaacaaagcacu

SEQ ID NO: 6568 - RNA, 22 nt, Artificial Sequence
  Description of Artificial Sequence: Synthetic oligonucleotide
acauuugggucauagcuugauc

SEQ ID NO: 6569 - RNA, 22 nt, Artificial Sequence
  Description of Artificial Sequence: Synthetic oligonucleotide
uacauuugggucauagcuugau

SEQ ID NO: 6570 - RNA, 22 nt, Artificial Sequence
  Description of Artificial Sequence: Synthetic oligonucleotide
aacuagcaagaauaccacgaaa

SEQ ID NO: 6571 - RNA, 22 nt, Artificial Sequence
  Description of Artificial Sequence: Synthetic oligonucleotide
acuagcaagaauaccacgaaag

SEQ ID NO: 6572 - RNA, 22 nt, Artificial Sequence
  Description of Artificial Sequence: Synthetic oligonucleotide
cuagcaagaauaccacgaaagc

SEQ ID NO: 6573 - RNA, 22 nt, Artificial Sequence
  Description of Artificial Sequence: Synthetic oligonucleotide
uagcaagaauaccacgaaagca

SEQ ID NO: 6574 - RNA, 22 nt, Artificial Sequence
  Description of Artificial Sequence: Synthetic oligonucleotide
agcaagaauaccacgaaagcaa

SEQ ID NO: 6575 - RNA, 22 nt, Artificial Sequence
  Description of Artificial Sequence: Synthetic oligonucleotide
gcaagaauaccacgaaagcaag

SEQ ID NO: 6576 - RNA, 22 nt, Artificial Sequence
  Description of Artificial Sequence: Synthetic oligonucleotide
caagaauaccacgaaagcaaga

SEQ ID NO: 6577 - RNA, 22 nt, Artificial Sequence
  Description of Artificial Sequence: Synthetic oligonucleotide
aagaauaccacgaaagcaagaa

SEQ ID NO: 6578 - RNA, 22 nt, Artificial Sequence
  Description of Artificial Sequence: Synthetic oligonucleotide
guaacuagcaagaauaccacga

SEQ ID NO: 6579 - RNA, 22 nt, Artificial Sequence
  Description of Artificial Sequence: Synthetic oligonucleotide
uaacuagcaagaauaccacgaa

SEQ ID NO: 6580 - RNA, 22 nt, Artificial Sequence
  Description of Artificial Sequence: Synthetic oligonucleotide
uugauuguccaaguacacacuc

SEQ ID NO: 6581 - RNA, 22 nt, Artificial Sequence
  Description of Artificial Sequence: Synthetic oligonucleotide
uuuaguagcagcaagauuagca

SEQ ID NO: 6582 - RNA, 22 nt, Artificial Sequence
  Description of Artificial Sequence: Synthetic oligonucleotide
uuguuccuugaggaaguuguag

SEQ ID NO: 6583 - RNA, 22 nt, Artificial Sequence
  Description of Artificial Sequence: Synthetic oligonucleotide
guuguuccuugaggaaguugua

SEQ ID NO: 6584 - RNA, 22 nt, Artificial Sequence
  Description of Artificial Sequence: Synthetic oligonucleotide
uccuugaggaaguuguagcacg

SEQ ID NO: 6585 - RNA, 22 nt, Artificial Sequence
  Description of Artificial Sequence: Synthetic oligonucleotide
uuccuugaggaaguuguagcac

SEQ ID NO: 6586 - RNA, 22 nt, Artificial Sequence
  Description of Artificial Sequence: Synthetic oligonucleotide
guuccuugaggaaguuguagca

SEQ ID NO: 6587 - RNA, 22 nt, Artificial Sequence
  Description of Artificial Sequence: Synthetic oligonucleotide
uguuccuugaggaaguuguagc

SEQ ID NO: 6588 - RNA, 22 nt, Artificial Sequence
  Description of Artificial Sequence: Synthetic oligonucleotide
cuugaggaaguuguagcacgau

SEQ ID NO: 6589 - RNA, 22 nt, Artificial Sequence
  Description of Artificial Sequence: Synthetic oligonucleotide
ccuugaggaaguuguagcacga

SEQ ID NO: 6590 - RNA, 22 nt, Artificial Sequence
  Description of Artificial Sequence: Synthetic oligonucleotide
caguugcaacccauaugaugcc

SEQ ID NO: 6591 - RNA, 22 nt, Artificial Sequence
  Description of Artificial Sequence: Synthetic oligonucleotide
ucaguugcaacccauaugaugc

SEQ ID NO: 6592 - RNA, 22 nt, Artificial Sequence
  Description of Artificial Sequence: Synthetic oligonucleotide
cucaguugcaacccauaugaug

SEQ ID NO: 6593 - RNA, 22 nt, Artificial Sequence
  Description of Artificial Sequence: Synthetic oligonucleotide
aagucacaaaauccuuuaggau

SEQ ID NO: 6594 - RNA, 22 nt, Artificial Sequence
  Description of Artificial Sequence: Synthetic oligonucleotide
cuaccacaugaaccauuaagga

SEQ ID NO: 6595 - RNA, 22 nt, Artificial Sequence
  Description of Artificial Sequence: Synthetic oligonucleotide
uaccacaugaaccauuaaggaa

SEQ ID NO: 6596 - RNA, 22 nt, Artificial Sequence
  Description of Artificial Sequence: Synthetic oligonucleotide
caaggcucuccaucuuaccuuu

SEQ ID NO: 6597 - RNA, 22 nt, Artificial Sequence
  Description of Artificial Sequence: Synthetic oligonucleotide
acaaggcucuccaucuuaccuu

SEQ ID NO: 6598 - RNA, 22 nt, Artificial Sequence
  Description of Artificial Sequence: Synthetic oligonucleotide
gacaaggcucuccaucuuaccu

SEQ ID NO: 6599 - RNA, 22 nt, Artificial Sequence
  Description of Artificial Sequence: Synthetic oligonucleotide
ggacaaggcucuccaucuuacc

SEQ ID NO: 6600 - RNA, 22 nt, Artificial Sequence
  Description of Artificial Sequence: Synthetic oligonucleotide
gcucuccaucuuaccuuucggu

SEQ ID NO: 6601 - RNA, 22 nt, Artificial Sequence
  Description of Artificial Sequence: Synthetic oligonucleotide
ggcucuccaucuuaccuuucgg

SEQ ID NO: 6602 - RNA, 22 nt, Artificial Sequence
  Description of Artificial Sequence: Synthetic oligonucleotide
aggcucuccaucuuaccuuucg

SEQ ID NO: 6603 - RNA, 22 nt, Artificial Sequence
  Description of Artificial Sequence: Synthetic oligonucleotide
aaggcucuccaucuuaccuuuc

SEQ ID NO: 6604 - RNA, 22 nt, Artificial Sequence
  Description of Artificial Sequence: Synthetic oligonucleotide
caauuguaugugacaaguauuu

SEQ ID NO: 6605 - RNA, 22 nt, Artificial Sequence
  Description of Artificial Sequence: Synthetic oligonucleotide
auuguaugugacaaguauuucu

SEQ ID NO: 6606 - RNA, 22 nt, Artificial Sequence
  Description of Artificial Sequence: Synthetic oligonucleotide
aauuguaugugacaaguauuuc

SEQ ID NO: 6607 - RNA, 22 nt, Artificial Sequence
  Description of Artificial Sequence: Synthetic oligonucleotide
uuguaugugacaaguauuucuu

SEQ ID NO: 6608 - RNA, 22 nt, Artificial Sequence
  Description of Artificial Sequence: Synthetic oligonucleotide
uuauaacgauaguagucauaau

SEQ ID NO: 6609 - RNA, 22 nt, Artificial Sequence
  Description of Artificial Sequence: Synthetic oligonucleotide
auuauaacgauaguagucauaa

SEQ ID NO: 6610 - RNA, 22 nt, Artificial Sequence
  Description of Artificial Sequence: Synthetic oligonucleotide
gauuauaacgauaguagucaua

SEQ ID NO: 6611 - RNA, 22 nt, Artificial Sequence
  Description of Artificial Sequence: Synthetic oligonucleotide
agauuauaacgauaguagucau

SEQ ID NO: 6612 - RNA, 22 nt, Artificial Sequence
  Description of Artificial Sequence: Synthetic oligonucleotide
uauaacgauaguagucauaauc

SEQ ID NO: 6613 - RNA, 22 nt, Artificial Sequence
  Description of Artificial Sequence: Synthetic oligonucleotide
gcaucacaacuagcuacaugug

SEQ ID NO: 6614 - RNA, 22 nt, Artificial Sequence
  Description of Artificial Sequence: Synthetic oligonucleotide
aucacaacuagcuacaugugca

SEQ ID NO: 6615 - RNA, 22 nt, Artificial Sequence
  Description of Artificial Sequence: Synthetic oligonucleotide
caucacaacuagcuacaugugc

SEQ ID NO: 6616 - RNA, 22 nt, Artificial Sequence
  Description of Artificial Sequence: Synthetic oligonucleotide
cacaacuagcuacaugugcauu

SEQ ID NO: 6617 - RNA, 22 nt, Artificial Sequence
  Description of Artificial Sequence: Synthetic oligonucleotide
ucacaacuagcuacaugugcau

SEQ ID NO: 6618 - RNA, 22 nt, Artificial Sequence
  Description of Artificial Sequence: Synthetic oligonucleotide
guucguuuagaccagaagauca

SEQ ID NO: 6619 - RNA, 22 nt, Artificial Sequence
  Description of Artificial Sequence: Synthetic oligonucleotide
uuuaguucguuuagaccagaag

SEQ ID NO: 6620 - RNA, 22 nt, Artificial Sequence
  Description of Artificial Sequence: Synthetic oligonucleotide
uuaguucguuuagaccagaaga

SEQ ID NO: 6621 - RNA, 22 nt, Artificial Sequence
  Description of Artificial Sequence: Synthetic oligonucleotide
uaguucguuuagaccagaagau

SEQ ID NO: 6622 - RNA, 22 nt, Artificial Sequence
  Description of Artificial Sequence: Synthetic oligonucleotide
aguucguuuagaccagaagauc

SEQ ID NO: 6623 - RNA, 22 nt, Artificial Sequence
  Description of Artificial Sequence: Synthetic oligonucleotide
uauuuaguucguuuagaccaga

SEQ ID NO: 6624 - RNA, 22 nt, Artificial Sequence
  Description of Artificial Sequence: Synthetic oligonucleotide
auuuaguucguuuagaccagaa

SEQ ID NO: 6625 - RNA, 22 nt, Artificial Sequence
  Description of Artificial Sequence: Synthetic oligonucleotide
uuguagucccagaucacaguau

SEQ ID NO: 6626 - RNA, 22 nt, Artificial Sequence
  Description of Artificial Sequence: Synthetic oligonucleotide
uguagucccagaucacaguauu

SEQ ID NO: 6627 - RNA, 22 nt, Artificial Sequence
  Description of Artificial Sequence: Synthetic oligonucleotide
cucccaauuuguaauaagaaag

SEQ ID NO: 6628 - RNA, 22 nt, Artificial Sequence
  Description of Artificial Sequence: Synthetic oligonucleotide
gcucccaauuuguaauaagaaa

SEQ ID NO: 6629 - RNA, 22 nt, Artificial Sequence
  Description of Artificial Sequence: Synthetic oligonucleotide
cccaauuuguaauaagaaagcg

SEQ ID NO: 6630 - RNA, 22 nt, Artificial Sequence
  Description of Artificial Sequence: Synthetic oligonucleotide
ucccaauuuguaauaagaaagc

SEQ ID NO: 6631 - RNA, 22 nt, Artificial Sequence
  Description of Artificial Sequence: Synthetic oligonucleotide
uauuuagguuguuuaauccuuu

SEQ ID NO: 6632 - RNA, 22 nt, Artificial Sequence
  Description of Artificial Sequence: Synthetic oligonucleotide
cuauuuagguuguuuaauccuu

SEQ ID NO: 6633 - RNA, 22 nt, Artificial Sequence
  Description of Artificial Sequence: Synthetic oligonucleotide
ucuauuuagguuguuuaauccu

SEQ ID NO: 6634 - RNA, 22 nt, Artificial Sequence
  Description of Artificial Sequence: Synthetic oligonucleotide
cucuauuuagguuguuuaaucc

SEQ ID NO: 6635 - RNA, 22 nt, Artificial Sequence
  Description of Artificial Sequence: Synthetic oligonucleotide
ccucuauuuagguuguuuaauc

SEQ ID NO: 6636 - RNA, 22 nt, Artificial Sequence
  Description of Artificial Sequence: Synthetic oligonucleotide
accucuauuuagguuguuuaau

SEQ ID NO: 6637 - RNA, 22 nt, Artificial Sequence
  Description of Artificial Sequence: Synthetic oligonucleotide
gaagcagaaaaagaugccaaaa

SEQ ID NO: 6638 - RNA, 22 nt, Artificial Sequence
  Description of Artificial Sequence: Synthetic oligonucleotide
uggugguugguaaagaacauca

SEQ ID NO: 6639 - RNA, 22 nt, Artificial Sequence
  Description of Artificial Sequence: Synthetic oligonucleotide
guggugguugguaaagaacauc

SEQ ID NO: 6640 - RNA, 22 nt, Artificial Sequence
  Description of Artificial Sequence: Synthetic oligonucleotide
uuugugcuccaaagacaacgua

SEQ ID NO: 6641 - RNA, 22 nt, Artificial Sequence
  Description of Artificial Sequence: Synthetic oligonucleotide
uccaaagacaacguauacacca

SEQ ID NO: 6642 - RNA, 22 nt, Artificial Sequence
  Description of Artificial Sequence: Synthetic oligonucleotide
cuccaaagacaacguauacacc

SEQ ID NO: 6643 - RNA, 22 nt, Artificial Sequence
  Description of Artificial Sequence: Synthetic oligonucleotide
caucuggugauguaugauucuu

SEQ ID NO: 6644 - RNA, 22 nt, Artificial Sequence
  Description of Artificial Sequence: Synthetic oligonucleotide
uucguuuagaccagaagaucag

SEQ ID NO: 6645 - RNA, 22 nt, Artificial Sequence
  Description of Artificial Sequence: Synthetic oligonucleotide
ucguuuagaccagaagaucagg

SEQ ID NO: 6646 - RNA, 22 nt, Artificial Sequence
  Description of Artificial Sequence: Synthetic oligonucleotide
cguuuagaccagaagaucagga

SEQ ID NO: 6647 - RNA, 22 nt, Artificial Sequence
  Description of Artificial Sequence: Synthetic oligonucleotide
uauacgacaucaguacuagugc

SEQ ID NO: 6648 - RNA, 22 nt, Artificial Sequence
  Description of Artificial Sequence: Synthetic oligonucleotide
auacgacaucaguacuagugcc

SEQ ID NO: 6649 - RNA, 22 nt, Artificial Sequence
  Description of Artificial Sequence: Synthetic oligonucleotide
uacgacaucaguacuagugccu

SEQ ID NO: 6650 - RNA, 22 nt, Artificial Sequence
  Description of Artificial Sequence: Synthetic oligonucleotide
acgacaucaguacuagugccug

SEQ ID NO: 6651 - RNA, 22 nt, Artificial Sequence
  Description of Artificial Sequence: Synthetic oligonucleotide
cgacaucaguacuagugccugu

SEQ ID NO: 6652 - RNA, 22 nt, Artificial Sequence
  Description of Artificial Sequence: Synthetic oligonucleotide
gacaucaguacuagugccugug

SEQ ID NO: 6653 - RNA, 22 nt, Artificial Sequence
  Description of Artificial Sequence: Synthetic oligonucleotide
acaucaguacuagugccugugc

SEQ ID NO: 6654 - RNA, 22 nt, Artificial Sequence
  Description of Artificial Sequence: Synthetic oligonucleotide
caucaguacuagugccugugcc

SEQ ID NO: 6655 - RNA, 22 nt, Artificial Sequence
  Description of Artificial Sequence: Synthetic oligonucleotide
uguauacgacaucaguacuagu

SEQ ID NO: 6656 - RNA, 22 nt, Artificial Sequence
  Description of Artificial Sequence: Synthetic oligonucleotide
guauacgacaucaguacuagug

SEQ ID NO: 6657 - RNA, 22 nt, Artificial Sequence
  Description of Artificial Sequence: Synthetic oligonucleotide
gguuuaauguugcgcuuagccc

SEQ ID NO: 6658 - RNA, 22 nt, Artificial Sequence
  Description of Artificial Sequence: Synthetic oligonucleotide
ugguuuaauguugcgcuuagcc

SEQ ID NO: 6659 - RNA, 22 nt, Artificial Sequence
  Description of Artificial Sequence: Synthetic oligonucleotide
guugcgcuuagcccaaagcuca

SEQ ID NO: 6660 - RNA, 22 nt, Artificial Sequence
  Description of Artificial Sequence: Synthetic oligonucleotide
uguugcgcuuagcccaaagcuc

SEQ ID NO: 6661 - RNA, 22 nt, Artificial Sequence
  Description of Artificial Sequence: Synthetic oligonucleotide
auguugcgcuuagcccaaagcu

SEQ ID NO: 6662 - RNA, 22 nt, Artificial Sequence
  Description of Artificial Sequence: Synthetic oligonucleotide
aauguugcgcuuagcccaaagc

SEQ ID NO: 6663 - RNA, 22 nt, Artificial Sequence
  Description of Artificial Sequence: Synthetic oligonucleotide
uaauguugcgcuuagcccaaag

SEQ ID NO: 6664 - RNA, 22 nt, Artificial Sequence
  Description of Artificial Sequence: Synthetic oligonucleotide
uuaauguugcgcuuagcccaaa

SEQ ID NO: 6665 - RNA, 22 nt, Artificial Sequence
  Description of Artificial Sequence: Synthetic oligonucleotide
uuuaauguugcgcuuagcccaa

SEQ ID NO: 6666 - RNA, 22 nt, Artificial Sequence
  Description of Artificial Sequence: Synthetic oligonucleotide
guuuaauguugcgcuuagccca

SEQ ID NO: 6667 - RNA, 22 nt, Artificial Sequence
  Description of Artificial Sequence: Synthetic oligonucleotide
gcuuguuccaauuacuacagua

SEQ ID NO: 6668 - RNA, 22 nt, Artificial Sequence
  Description of Artificial Sequence: Synthetic oligonucleotide
cuuguuccaauuacuacaguag

SEQ ID NO: 6669 - RNA, 22 nt, Artificial Sequence
  Description of Artificial Sequence: Synthetic oligonucleotide
uugcuuguuccaauuacuacag

SEQ ID NO: 6670 - RNA, 22 nt, Artificial Sequence
  Description of Artificial Sequence: Synthetic oligonucleotide
ugcuuguuccaauuacuacagu

SEQ ID NO: 6671 - RNA, 22 nt, Artificial Sequence
  Description of Artificial Sequence: Synthetic oligonucleotide
guuccaauuacuacaguagcuc

SEQ ID NO: 6672 - RNA, 22 nt, Artificial Sequence
  Description of Artificial Sequence: Synthetic oligonucleotide
uuccaauuacuacaguagcucc

SEQ ID NO: 6673 - RNA, 22 nt, Artificial Sequence
  Description of Artificial Sequence: Synthetic oligonucleotide
uuguuccaauuacuacaguagc

SEQ ID NO: 6674 - RNA, 22 nt, Artificial Sequence
  Description of Artificial Sequence: Synthetic oligonucleotide
uguuccaauuacuacaguagcu

SEQ ID NO: 6675 - RNA, 22 nt, Artificial Sequence
  Description of Artificial Sequence: Synthetic oligonucleotide
accagguggucccuggagugua

SEQ ID NO: 6676 - RNA, 22 nt, Artificial Sequence
  Description of Artificial Sequence: Synthetic oligonucleotide
cagguggucccuggaguguaga

SEQ ID NO: 6677 - RNA, 22 nt, Artificial Sequence
  Description of Artificial Sequence: Synthetic oligonucleotide
uugugcuuacaaaggcacgcua

SEQ ID NO: 6678 - RNA, 22 nt, Artificial Sequence
  Description of Artificial Sequence: Synthetic oligonucleotide
cuugugcuuacaaaggcacgcu

SEQ ID NO: 6679 - RNA, 22 nt, Artificial Sequence
  Description of Artificial Sequence: Synthetic oligonucleotide
gugcuuacaaaggcacgcuagu

SEQ ID NO: 6680 - RNA, 22 nt, Artificial Sequence
  Description of Artificial Sequence: Synthetic oligonucleotide
ugugcuuacaaaggcacgcuag

SEQ ID NO: 6681 - RNA, 22 nt, Artificial Sequence
  Description of Artificial Sequence: Synthetic oligonucleotide
gcuugugcuuacaaaggcacgc

SEQ ID NO: 6682 - RNA, 22 nt, Artificial Sequence
  Description of Artificial Sequence: Synthetic oligonucleotide
aaaacguuuauauagcccaucu

SEQ ID NO: 6683 - RNA, 22 nt, Artificial Sequence
  Description of Artificial Sequence: Synthetic oligonucleotide
aaacguuuauauagcccaucug

SEQ ID NO: 6684 - RNA, 22 nt, Artificial Sequence
  Description of Artificial Sequence: Synthetic oligonucleotide
uuuauauagcccaucugccuug

SEQ ID NO: 6685 - RNA, 22 nt, Artificial Sequence
  Description of Artificial Sequence: Synthetic oligonucleotide
uuauauagcccaucugccuugu

SEQ ID NO: 6686 - RNA, 22 nt, Artificial Sequence
  Description of Artificial Sequence: Synthetic oligonucleotide
uauauagcccaucugccuugug

SEQ ID NO: 6687 - RNA, 22 nt, Artificial Sequence
  Description of Artificial Sequence: Synthetic oligonucleotide
auauagcccaucugccuugugu

SEQ ID NO: 6688 - RNA, 22 nt, Artificial Sequence
  Description of Artificial Sequence: Synthetic oligonucleotide
aacguuuauauagcccaucugc

SEQ ID NO: 6689 - RNA, 22 nt, Artificial Sequence
  Description of Artificial Sequence: Synthetic oligonucleotide
acguuuauauagcccaucugcc

SEQ ID NO: 6690 - RNA, 22 nt, Artificial Sequence
  Description of Artificial Sequence: Synthetic oligonucleotide
cguuuauauagcccaucugccu

SEQ ID NO: 6691 - RNA, 22 nt, Artificial Sequence
  Description of Artificial Sequence: Synthetic oligonucleotide
guuuauauagcccaucugccuu

SEQ ID NO: 6692 - RNA, 22 nt, Artificial Sequence
  Description of Artificial Sequence: Synthetic oligonucleotide
ggugcugacaucauaacaaaag

SEQ ID NO: 6693 - RNA, 22 nt, Artificial Sequence
  Description of Artificial Sequence: Synthetic oligonucleotide
guggugcugacaucauaacaaa

SEQ ID NO: 6694 - RNA, 22 nt, Artificial Sequence
  Description of Artificial Sequence: Synthetic oligonucleotide
uggugcugacaucauaacaaaa

SEQ ID NO: 6695 - RNA, 22 nt, Artificial Sequence
  Description of Artificial Sequence: Synthetic oligonucleotide
guuauaguagggaugacauuac

SEQ ID NO: 6696 - RNA, 22 nt, Artificial Sequence
  Description of Artificial Sequence: Synthetic oligonucleotide
aguuauaguagggaugacauua

SEQ ID NO: 6697 - RNA, 22 nt, Artificial Sequence
  Description of Artificial Sequence: Synthetic oligonucleotide
guauaugcgaaaagugcaucuu

SEQ ID NO: 6698 - RNA, 22 nt, Artificial Sequence
  Description of Artificial Sequence: Synthetic oligonucleotide
uaguagggaugacauuacguuu

SEQ ID NO: 6699 - RNA, 22 nt, Artificial Sequence
  Description of Artificial Sequence: Synthetic oligonucleotide
auaguagggaugacauuacguu

SEQ ID NO: 6700 - RNA, 22 nt, Artificial Sequence
  Description of Artificial Sequence: Synthetic oligonucleotide
uauaguagggaugacauuacgu

SEQ ID NO: 6701 - RNA, 22 nt, Artificial Sequence
  Description of Artificial Sequence: Synthetic oligonucleotide
uuauaguagggaugacauuacg

SEQ ID NO: 6702 - RNA, 22 nt, Artificial Sequence
  Description of Artificial Sequence: Synthetic oligonucleotide
gaaccaagacgcaguauuauug

SEQ ID NO: 6703 - RNA, 22 nt, Artificial Sequence
  Description of Artificial Sequence: Synthetic oligonucleotide
aaccaagacgcaguauuauugg

SEQ ID NO: 6704 - RNA, 22 nt, Artificial Sequence
  Description of Artificial Sequence: Synthetic oligonucleotide
caaguuccgaggaacaugucug

SEQ ID NO: 6705 - RNA, 22 nt, Artificial Sequence
  Description of Artificial Sequence: Synthetic oligonucleotide
acaaagucauuaagaucugaau

SEQ ID NO: 6706 - RNA, 22 nt, Artificial Sequence
  Description of Artificial Sequence: Synthetic oligonucleotide
uuaagaucugaaucgacaagca

SEQ ID NO: 6707 - RNA, 22 nt, Artificial Sequence
  Description of Artificial Sequence: Synthetic oligonucleotide
aaagucauuaagaucugaaucg

SEQ ID NO: 6708 - RNA, 22 nt, Artificial Sequence
  Description of Artificial Sequence: Synthetic oligonucleotide
acaagaguagacuauauaucgu

SEQ ID NO: 6709 - RNA, 22 nt, Artificial Sequence
  Description of Artificial Sequence: Synthetic oligonucleotide
uaaaaugucaaguacaaguaaa

SEQ ID NO: 6710 - RNA, 22 nt, Artificial Sequence
  Description of Artificial Sequence: Synthetic oligonucleotide
auaaaaugucaaguacaaguaa

SEQ ID NO: 6711 - RNA, 22 nt, Artificial Sequence
  Description of Artificial Sequence: Synthetic oligonucleotide
auaugacauagucauauucuga

SEQ ID NO: 6712 - RNA, 22 nt, Artificial Sequence
  Description of Artificial Sequence: Synthetic oligonucleotide
gaauaugacauagucauauucu

SEQ ID NO: 6713 - RNA, 22 nt, Artificial Sequence
  Description of Artificial Sequence: Synthetic oligonucleotide
aauaugacauagucauauucug

SEQ ID NO: 6714 - RNA, 22 nt, Artificial Sequence
  Description of Artificial Sequence: Synthetic oligonucleotide
uugacaguuugaaaagcaacau

SEQ ID NO: 6715 - RNA, 22 nt, Artificial Sequence
  Description of Artificial Sequence: Synthetic oligonucleotide
ugacaguuugaaaagcaacauu

SEQ ID NO: 6716 - RNA, 22 nt, Artificial Sequence
  Description of Artificial Sequence: Synthetic oligonucleotide
caguuugaaaagcaacauuguu

SEQ ID NO: 6717 - RNA, 22 nt, Artificial Sequence
  Description of Artificial Sequence: Synthetic oligonucleotide
aguuugaaaagcaacauuguua

SEQ ID NO: 6718 - RNA, 22 nt, Artificial Sequence
  Description of Artificial Sequence: Synthetic oligonucleotide
gacaguuugaaaagcaacauug

SEQ ID NO: 6719 - RNA, 22 nt, Artificial Sequence
  Description of Artificial Sequence: Synthetic oligonucleotide
acaguuugaaaagcaacauugu

SEQ ID NO: 6720 - RNA, 22 nt, Artificial Sequence
  Description of Artificial Sequence: Synthetic oligonucleotide
guuugaaaagcaacauuguuag

SEQ ID NO: 6721 - RNA, 22 nt, Artificial Sequence
  Description of Artificial Sequence: Synthetic oligonucleotide
uuugaaaagcaacauuguuagu

SEQ ID NO: 6722 - RNA, 22 nt, Artificial Sequence
  Description of Artificial Sequence: Synthetic oligonucleotide
aauaucucugcuauaguaaccu

SEQ ID NO: 6723 - RNA, 22 nt, Artificial Sequence
  Description of Artificial Sequence: Synthetic oligonucleotide
auaucucugcuauaguaaccug

SEQ ID NO: 6724 - RNA, 22 nt, Artificial Sequence
  Description of Artificial Sequence: Synthetic oligonucleotide
aguuuguaauauuaggaaaucu

SEQ ID NO: 6725 - RNA, 22 nt, Artificial Sequence
  Description of Artificial Sequence: Synthetic oligonucleotide
aggcuuguaucgguaucguugc

SEQ ID NO: 6726 - RNA, 22 nt, Artificial Sequence
  Description of Artificial Sequence: Synthetic oligonucleotide
gaggcuuguaucgguaucguug

SEQ ID NO: 6727 - RNA, 22 nt, Artificial Sequence
  Description of Artificial Sequence: Synthetic oligonucleotide
ugaaauugcaccaaaauuggag

SEQ ID NO: 6728 - RNA, 22 nt, Artificial Sequence
  Description of Artificial Sequence: Synthetic oligonucleotide
uugcaccaaaauuggagcuaag

SEQ ID NO: 6729 - RNA, 22 nt, Artificial Sequence
  Description of Artificial Sequence: Synthetic oligonucleotide
ugcaccaaaauuggagcuaagu

SEQ ID NO: 6730 - RNA, 22 nt, Artificial Sequence
  Description of Artificial Sequence: Synthetic oligonucleotide
gcaccaaaauuggagcuaaguu

SEQ ID NO: 6731 - RNA, 22 nt, Artificial Sequence
  Description of Artificial Sequence: Synthetic oligonucleotide
caccaaaauuggagcuaaguug

SEQ ID NO: 6732 - RNA, 22 nt, Artificial Sequence
  Description of Artificial Sequence: Synthetic oligonucleotide
gaaauugcaccaaaauuggagc

SEQ ID NO: 6733 - RNA, 22 nt, Artificial Sequence
  Description of Artificial Sequence: Synthetic oligonucleotide
aaauugcaccaaaauuggagcu

SEQ ID NO: 6734 - RNA, 22 nt, Artificial Sequence
  Description of Artificial Sequence: Synthetic oligonucleotide
aauugcaccaaaauuggagcua

SEQ ID NO: 6735 - RNA, 22 nt, Artificial Sequence
  Description of Artificial Sequence: Synthetic oligonucleotide
auugcaccaaaauuggagcuaa

SEQ ID NO: 6736 - RNA, 22 nt, Artificial Sequence
  Description of Artificial Sequence: Synthetic oligonucleotide
guacuucauagccacaagguua

SEQ ID NO: 6737 - RNA, 22 nt, Artificial Sequence
  Description of Artificial Sequence: Synthetic oligonucleotide
uguacuucauagccacaagguu

SEQ ID NO: 6738 - RNA, 22 nt, Artificial Sequence
  Description of Artificial Sequence: Synthetic oligonucleotide
uuguacuucauagccacaaggu

SEQ ID NO: 6739 - RNA, 22 nt, Artificial Sequence
  Description of Artificial Sequence: Synthetic oligonucleotide
gcacaaauagaagucaauuaau

SEQ ID NO: 6740 - RNA, 22 nt, Artificial Sequence
  Description of Artificial Sequence: Synthetic oligonucleotide
cacaaauagaagucaauuaaug

SEQ ID NO: 6741 - RNA, 22 nt, Artificial Sequence
  Description of Artificial Sequence: Synthetic oligonucleotide
aaagcuugagucuuucaguaca

SEQ ID NO: 6742 - RNA, 22 nt, Artificial Sequence
  Description of Artificial Sequence: Synthetic oligonucleotide
aaaagcuugagucuuucaguac

SEQ ID NO: 6743 - RNA, 22 nt, Artificial Sequence
  Description of Artificial Sequence: Synthetic oligonucleotide
guuaacaccuguagaaaaaccu

SEQ ID NO: 6744 - RNA, 22 nt, Artificial Sequence
  Description of Artificial Sequence: Synthetic oligonucleotide
acuagguuaacaccuguagaaa

SEQ ID NO: 6745 - RNA, 22 nt, Artificial Sequence
  Description of Artificial Sequence: Synthetic oligonucleotide
cuagguuaacaccuguagaaaa

SEQ ID NO: 6746 - RNA, 22 nt, Artificial Sequence
  Description of Artificial Sequence: Synthetic oligonucleotide
gucuguaacaaaccuacaaggu

SEQ ID NO: 6747 - RNA, 22 nt, Artificial Sequence
  Description of Artificial Sequence: Synthetic oligonucleotide
ucuguaacaaaccuacaaggug

SEQ ID NO: 6748 - RNA, 22 nt, Artificial Sequence
  Description of Artificial Sequence: Synthetic oligonucleotide
cuguaacaaaccuacaaggugg

SEQ ID NO: 6749 - RNA, 22 nt, Artificial Sequence
  Description of Artificial Sequence: Synthetic oligonucleotide
uguaacaaaccuacaagguggu

SEQ ID NO: 6750 - RNA, 22 nt, Artificial Sequence
  Description of Artificial Sequence: Synthetic oligonucleotide
gugugucuguaacaaaccuaca

SEQ ID NO: 6751 - RNA, 22 nt, Artificial Sequence
  Description of Artificial Sequence: Synthetic oligonucleotide
ugugucuguaacaaaccuacaa

SEQ ID NO: 6752 - RNA, 22 nt, Artificial Sequence
  Description of Artificial Sequence: Synthetic oligonucleotide
gugucuguaacaaaccuacaag

SEQ ID NO: 6753 - RNA, 22 nt, Artificial Sequence
  Description of Artificial Sequence: Synthetic oligonucleotide
ugucuguaacaaaccuacaagg

SEQ ID NO: 6754 - RNA, 22 nt, Artificial Sequence
  Description of Artificial Sequence: Synthetic oligonucleotide
aggugugucuguaacaaaccua

SEQ ID NO: 6755 - RNA, 22 nt, Artificial Sequence
  Description of Artificial Sequence: Synthetic oligonucleotide
ggugugucuguaacaaaccuac

SEQ ID NO: 6756 - RNA, 22 nt, Artificial Sequence
  Description of Artificial Sequence: Synthetic oligonucleotide
uaagcuuugucacuacaaggcu

SEQ ID NO: 6757 - RNA, 22 nt, Artificial Sequence
  Description of Artificial Sequence: Synthetic oligonucleotide
aagcuuugucacuacaaggcug

SEQ ID NO: 6758 - RNA, 22 nt, Artificial Sequence
  Description of Artificial Sequence: Synthetic oligonucleotide
uuugcauagaauguccaauaac

SEQ ID NO: 6759 - RNA, 22 nt, Artificial Sequence
  Description of Artificial Sequence: Synthetic oligonucleotide
gagguccuuuaguaaggucagu

SEQ ID NO: 6760 - RNA, 22 nt, Artificial Sequence
  Description of Artificial Sequence: Synthetic oligonucleotide
ugagguccuuuaguaaggucag

SEQ ID NO: 6761 - RNA, 22 nt, Artificial Sequence
  Description of Artificial Sequence: Synthetic oligonucleotide
gguccuuuaguaaggucagucu

SEQ ID NO: 6762 - RNA, 22 nt, Artificial Sequence
  Description of Artificial Sequence: Synthetic oligonucleotide
agguccuuuaguaaggucaguc

SEQ ID NO: 6763 - RNA, 22 nt, Artificial Sequence
  Description of Artificial Sequence: Synthetic oligonucleotide
ucaugagguccuuuaguaaggu

SEQ ID NO: 6764 - RNA, 22 nt, Artificial Sequence
  Description of Artificial Sequence: Synthetic oligonucleotide
uucaugagguccuuuaguaagg

SEQ ID NO: 6765 - RNA, 22 nt, Artificial Sequence
  Description of Artificial Sequence: Synthetic oligonucleotide
augagguccuuuaguaagguca

SEQ ID NO: 6766 - RNA, 22 nt, Artificial Sequence
  Description of Artificial Sequence: Synthetic oligonucleotide
caugagguccuuuaguaagguc

SEQ ID NO: 6767 - RNA, 22 nt, Artificial Sequence
  Description of Artificial Sequence: Synthetic oligonucleotide
aaccuguuugcgcaucuguuau

SEQ ID NO: 6768 - RNA, 22 nt, Artificial Sequence
  Description of Artificial Sequence: Synthetic oligonucleotide
ugcauggcugcaucacggucaa

SEQ ID NO: 6769 - RNA, 22 nt, Artificial Sequence
  Description of Artificial Sequence: Synthetic oligonucleotide
gcauggcugcaucacggucaaa

SEQ ID NO: 6770 - RNA, 22 nt, Artificial Sequence
  Description of Artificial Sequence: Synthetic oligonucleotide
gcaucacggucaaauucagauu

SEQ ID NO: 6771 - RNA, 22 nt, Artificial Sequence
  Description of Artificial Sequence: Synthetic oligonucleotide
gcccacauggaaauggcuugau

SEQ ID NO: 6772 - RNA, 22 nt, Artificial Sequence
  Description of Artificial Sequence: Synthetic oligonucleotide
cccacauggaaauggcuugauc

SEQ ID NO: 6773 - RNA, 22 nt, Artificial Sequence
  Description of Artificial Sequence: Synthetic oligonucleotide
ccacauggaaauggcuugaucu

SEQ ID NO: 6774 - RNA, 22 nt, Artificial Sequence
  Description of Artificial Sequence: Synthetic oligonucleotide
cacauggaaauggcuugaucua

SEQ ID NO: 6775 - RNA, 22 nt, Artificial Sequence
  Description of Artificial Sequence: Synthetic oligonucleotide
acauggaaauggcuugaucuaa

SEQ ID NO: 6776 - RNA, 22 nt, Artificial Sequence
  Description of Artificial Sequence: Synthetic oligonucleotide
cauggaaauggcuugaucuaaa

SEQ ID NO: 6777 - RNA, 22 nt, Artificial Sequence
  Description of Artificial Sequence: Synthetic oligonucleotide
auggaaauggcuugaucuaaag

SEQ ID NO: 6778 - RNA, 22 nt, Artificial Sequence
  Description of Artificial Sequence: Synthetic oligonucleotide
aaaaguuagcagcuucaccagc

SEQ ID NO: 6779 - RNA, 22 nt, Artificial Sequence
  Description of Artificial Sequence: Synthetic oligonucleotide
aacagaucuacaagagaucgaa

SEQ ID NO: 6780 - RNA, 22 nt, Artificial Sequence
  Description of Artificial Sequence: Synthetic oligonucleotide
auuuaucaaaacacucuacacg

SEQ ID NO: 6781 - RNA, 22 nt, Artificial Sequence
  Description of Artificial Sequence: Synthetic oligonucleotide
gaauuuaucaaaacacucuaca

SEQ ID NO: 6782 - RNA, 22 nt, Artificial Sequence
  Description of Artificial Sequence: Synthetic oligonucleotide
aauuuaucaaaacacucuacac

SEQ ID NO: 6783 - RNA, 22 nt, Artificial Sequence
  Description of Artificial Sequence: Synthetic oligonucleotide
uugaauuuaucaaaacacucua

SEQ ID NO: 6784 - RNA, 22 nt, Artificial Sequence
  Description of Artificial Sequence: Synthetic oligonucleotide
ugaauuuaucaaaacacucuac

SEQ ID NO: 6785 - RNA, 22 nt, Artificial Sequence
  Description of Artificial Sequence: Synthetic oligonucleotide
cuuugaauuuaucaaaacacuc

SEQ ID NO: 6786 - RNA, 22 nt, Artificial Sequence
  Description of Artificial Sequence: Synthetic oligonucleotide
uuugaauuuaucaaaacacucu

SEQ ID NO: 6787 - RNA, 22 nt, Artificial Sequence
  Description of Artificial Sequence: Synthetic oligonucleotide
cacuuugaauuuaucaaaacac

SEQ ID NO: 6788 - RNA, 22 nt, Artificial Sequence
  Description of Artificial Sequence: Synthetic oligonucleotide
acuuugaauuuaucaaaacacu

SEQ ID NO: 6789 - RNA, 22 nt, Artificial Sequence
  Description of Artificial Sequence: Synthetic oligonucleotide
ucuuaacuacaaaguaagaauc

SEQ ID NO: 6790 - RNA, 22 nt, Artificial Sequence
  Description of Artificial Sequence: Synthetic oligonucleotide
cucuuaacuacaaaguaagaau

SEQ ID NO: 6791 - RNA, 22 nt, Artificial Sequence
  Description of Artificial Sequence: Synthetic oligonucleotide
ugucucuuaacuacaaaguaag

SEQ ID NO: 6792 - RNA, 22 nt, Artificial Sequence
  Description of Artificial Sequence: Synthetic oligonucleotide
gucucuuaacuacaaaguaaga

SEQ ID NO: 6793 - RNA, 22 nt, Artificial Sequence
  Description of Artificial Sequence: Synthetic oligonucleotide
ugcuaugugagauuaaaguuaa

SEQ ID NO: 6794 - RNA, 22 nt, Artificial Sequence
  Description of Artificial Sequence: Synthetic oligonucleotide
uugcuaugugagauuaaaguua

SEQ ID NO: 6795 - RNA, 22 nt, Artificial Sequence
  Description of Artificial Sequence: Synthetic oligonucleotide
cuaugugagauuaaaguuaacu

SEQ ID NO: 6796 - RNA, 22 nt, Artificial Sequence
  Description of Artificial Sequence: Synthetic oligonucleotide
gcuaugugagauuaaaguuaac

SEQ ID NO: 6797 - RNA, 22 nt, Artificial Sequence
  Description of Artificial Sequence: Synthetic oligonucleotide
augugagauuaaaguuaacuac

SEQ ID NO: 6798 - RNA, 22 nt, Artificial Sequence
  Description of Artificial Sequence: Synthetic oligonucleotide
uaugugagauuaaaguuaacua

SEQ ID NO: 6799 - RNA, 22 nt, Artificial Sequence
  Description of Artificial Sequence: Synthetic oligonucleotide
ugugagauuaaaguuaacuaca

SEQ ID NO: 6800 - RNA, 22 nt, Artificial Sequence
  Description of Artificial Sequence: Synthetic oligonucleotide
uuugugaaaaauuaaaaccacc

SEQ ID NO: 6801 - RNA, 22 nt, Artificial Sequence
  Description of Artificial Sequence: Synthetic oligonucleotide
uuaccauccugagcaaagaaga

SEQ ID NO: 6802 - RNA, 22 nt, Artificial Sequence
  Description of Artificial Sequence: Synthetic oligonucleotide
ccugagcaaagaagaaguguuu

SEQ ID NO: 6803 - RNA, 22 nt, Artificial Sequence
  Description of Artificial Sequence: Synthetic oligonucleotide
uuuaauucaacagaacuuccuu

SEQ ID NO: 6804 - RNA, 22 nt, Artificial Sequence
  Description of Artificial Sequence: Synthetic oligonucleotide
auccugagcaaagaagaagugu

SEQ ID NO: 6805 - RNA, 22 nt, Artificial Sequence
  Description of Artificial Sequence: Synthetic oligonucleotide
uccugagcaaagaagaaguguu

SEQ ID NO: 6806 - RNA, 22 nt, Artificial Sequence
  Description of Artificial Sequence: Synthetic oligonucleotide
ccauccugagcaaagaagaagu

SEQ ID NO: 6807 - RNA, 22 nt, Artificial Sequence
  Description of Artificial Sequence: Synthetic oligonucleotide
cauccugagcaaagaagaagug

SEQ ID NO: 6808 - RNA, 22 nt, Artificial Sequence
  Description of Artificial Sequence: Synthetic oligonucleotide
uaccauccugagcaaagaagaa

SEQ ID NO: 6809 - RNA, 22 nt, Artificial Sequence
  Description of Artificial Sequence: Synthetic oligonucleotide
accauccugagcaaagaagaag

SEQ ID NO: 6810 - RNA, 22 nt, Artificial Sequence
  Description of Artificial Sequence: Synthetic oligonucleotide
aaagggagugaggcuuguaucg

SEQ ID NO: 6811 - RNA, 22 nt, Artificial Sequence
  Description of Artificial Sequence: Synthetic oligonucleotide
agggagugaggcuuguaucggu

SEQ ID NO: 6812 - RNA, 22 nt, Artificial Sequence
  Description of Artificial Sequence: Synthetic oligonucleotide
uuaugucuacagcacccugcau

SEQ ID NO: 6813 - RNA, 22 nt, Artificial Sequence
  Description of Artificial Sequence: Synthetic oligonucleotide
uuuaugucuacagcacccugca

SEQ ID NO: 6814 - RNA, 22 nt, Artificial Sequence
  Description of Artificial Sequence: Synthetic oligonucleotide
gaaaucaccgaaaucauaccag

SEQ ID NO: 6815 - RNA, 22 nt, Artificial Sequence
  Description of Artificial Sequence: Synthetic oligonucleotide
aaaucaccgaaaucauaccagu

SEQ ID NO: 6816 - RNA, 22 nt, Artificial Sequence
  Description of Artificial Sequence: Synthetic oligonucleotide
agguuccaccugguuuaacaua

SEQ ID NO: 6817 - RNA, 22 nt, Artificial Sequence
  Description of Artificial Sequence: Synthetic oligonucleotide
gguuccaccugguuuaacauau

SEQ ID NO: 6818 - RNA, 22 nt, Artificial Sequence
  Description of Artificial Sequence: Synthetic oligonucleotide
caccugguuuaacauauaguga

SEQ ID NO: 6819 - RNA, 22 nt, Artificial Sequence
  Description of Artificial Sequence: Synthetic oligonucleotide
accugguuuaacauauagugaa

SEQ ID NO: 6820 - RNA, 22 nt, Artificial Sequence
  Description of Artificial Sequence: Synthetic oligonucleotide
ccugguuuaacauauagugaac

SEQ ID NO: 6821 - RNA, 22 nt, Artificial Sequence
  Description of Artificial Sequence: Synthetic oligonucleotide
cugguuuaacauauagugaacc

SEQ ID NO: 6822 - RNA, 22 nt, Artificial Sequence
  Description of Artificial Sequence: Synthetic oligonucleotide
guuccaccugguuuaacauaua

SEQ ID NO: 6823 - RNA, 22 nt, Artificial Sequence
  Description of Artificial Sequence: Synthetic oligonucleotide
uuccaccugguuuaacauauag

SEQ ID NO: 6824 - RNA, 22 nt, Artificial Sequence
  Description of Artificial Sequence: Synthetic oligonucleotide
uccaccugguuuaacauauagu

SEQ ID NO: 6825 - RNA, 22 nt, Artificial Sequence
  Description of Artificial Sequence: Synthetic oligonucleotide
ccaccugguuuaacauauagug

SEQ ID NO: 6826 - RNA, 22 nt, Artificial Sequence
  Description of Artificial Sequence: Synthetic oligonucleotide
guugaaucugaggguccaccaa

SEQ ID NO: 6827 - RNA, 22 nt, Artificial Sequence
  Description of Artificial Sequence: Synthetic oligonucleotide
aguugaaucugaggguccacca

SEQ ID NO: 6828 - RNA, 22 nt, Artificial Sequence
  Description of Artificial Sequence: Synthetic oligonucleotide
caguugaaucugaggguccacc

SEQ ID NO: 6829 - RNA, 22 nt, Artificial Sequence
  Description of Artificial Sequence: Synthetic oligonucleotide
guuauuagaguaagcaacugaa

SEQ ID NO: 6830 - RNA, 22 nt, Artificial Sequence
  Description of Artificial Sequence: Synthetic oligonucleotide
ccucuuguccucagaucuagcc

SEQ ID NO: 6831 - RNA, 22 nt, Artificial Sequence
  Description of Artificial Sequence: Synthetic oligonucleotide
cucuuguccucagaucuagccu

SEQ ID NO: 6832 - RNA, 22 nt, Artificial Sequence
  Description of Artificial Sequence: Synthetic oligonucleotide
ucuuguccucagaucuagccug

SEQ ID NO: 6833 - RNA, 22 nt, Artificial Sequence
  Description of Artificial Sequence: Synthetic oligonucleotide
cuuguccucagaucuagccugu

SEQ ID NO: 6834 - RNA, 22 nt, Artificial Sequence
  Description of Artificial Sequence: Synthetic oligonucleotide
uugcccucuuguccucagaucu

SEQ ID NO: 6835 - RNA, 22 nt, Artificial Sequence
  Description of Artificial Sequence: Synthetic oligonucleotide
ugcccucuuguccucagaucua

SEQ ID NO: 6836 - RNA, 22 nt, Artificial Sequence
  Description of Artificial Sequence: Synthetic oligonucleotide
gcccucuuguccucagaucuag

SEQ ID NO: 6837 - RNA, 22 nt, Artificial Sequence
  Description of Artificial Sequence: Synthetic oligonucleotide
cccucuuguccucagaucuagc

SEQ ID NO: 6838 - RNA, 22 nt, Artificial Sequence
  Description of Artificial Sequence: Synthetic oligonucleotide
uuugcccucuuguccucagauc

SEQ ID NO: 6839 - RNA, 22 nt, Artificial Sequence
  Description of Artificial Sequence: Synthetic oligonucleotide
aaagaaguacgcuauuaacuau

SEQ ID NO: 6840 - RNA, 22 nt, Artificial Sequence
  Description of Artificial Sequence: Synthetic oligonucleotide
aaaagaaguacgcuauuaacua

SEQ ID NO: 6841 - RNA, 22 nt, Artificial Sequence
  Description of Artificial Sequence: Synthetic oligonucleotide
agaaguacgcuauuaacuauua

SEQ ID NO: 6842 - RNA, 22 nt, Artificial Sequence
  Description of Artificial Sequence: Synthetic oligonucleotide
aagaaguacgcuauuaacuauu

SEQ ID NO: 6843 - RNA, 22 nt, Artificial Sequence
  Description of Artificial Sequence: Synthetic oligonucleotide
aaguacgcuauuaacuauuaac

SEQ ID NO: 6844 - RNA, 22 nt, Artificial Sequence
  Description of Artificial Sequence: Synthetic oligonucleotide
gaaguacgcuauuaacuauuaa

SEQ ID NO: 6845 - RNA, 22 nt, Artificial Sequence
  Description of Artificial Sequence: Synthetic oligonucleotide
guacgcuauuaacuauuaacgu

SEQ ID NO: 6846 - RNA, 22 nt, Artificial Sequence
  Description of Artificial Sequence: Synthetic oligonucleotide
aguacgcuauuaacuauuaacg

SEQ ID NO: 6847 - RNA, 22 nt, Artificial Sequence
  Description of Artificial Sequence: Synthetic oligonucleotide
acgcuauuaacuauuaacguac

SEQ ID NO: 6848 - RNA, 22 nt, Artificial Sequence
  Description of Artificial Sequence: Synthetic oligonucleotide
uacgcuauuaacuauuaacgua

SEQ ID NO: 6849 - RNA, 22 nt, Artificial Sequence
  Description of Artificial Sequence: Synthetic oligonucleotide
aagcagaaaaagaugccaaaau

SEQ ID NO: 6850 - RNA, 22 nt, Artificial Sequence
  Description of Artificial Sequence: Synthetic oligonucleotide
acgagaagaggcuugacugccg

SEQ ID NO: 6851 - RNA, 22 nt, Artificial Sequence
  Description of Artificial Sequence: Synthetic oligonucleotide
cgagaagaggcuugacugccgc

SEQ ID NO: 6852 - RNA, 22 nt, Artificial Sequence
  Description of Artificial Sequence: Synthetic oligonucleotide
gagaagaggcuugacugccgcc

SEQ ID NO: 6853 - RNA, 22 nt, Artificial Sequence
  Description of Artificial Sequence: Synthetic oligonucleotide
agaagaggcuugacugccgccu

SEQ ID NO: 6854 - RNA, 22 nt, Artificial Sequence
  Description of Artificial Sequence: Synthetic oligonucleotide
aggaacgagaagaggcuugacu

SEQ ID NO: 6855 - RNA, 22 nt, Artificial Sequence
  Description of Artificial Sequence: Synthetic oligonucleotide
ggaacgagaagaggcuugacug

SEQ ID NO: 6856 - RNA, 22 nt, Artificial Sequence
  Description of Artificial Sequence: Synthetic oligonucleotide
gaacgagaagaggcuugacugc

SEQ ID NO: 6857 - RNA, 22 nt, Artificial Sequence
  Description of Artificial Sequence: Synthetic oligonucleotide
aacgagaagaggcuugacugcc

SEQ ID NO: 6858 - RNA, 22 nt, Artificial Sequence
  Description of Artificial Sequence: Synthetic oligonucleotide
ugaggaacgagaagaggcuuga

SEQ ID NO: 6859 - RNA, 22 nt, Artificial Sequence
  Description of Artificial Sequence: Synthetic oligonucleotide
gaggaacgagaagaggcuugac

SEQ ID NO: 6860 - RNA, 22 nt, Artificial Sequence
  Description of Artificial Sequence: Synthetic oligonucleotide
cuuggguuuguucuggaccacg

SEQ ID NO: 6861 - RNA, 22 nt, Artificial Sequence
  Description of Artificial Sequence: Synthetic oligonucleotide
uuggguuuguucuggaccacgu

SEQ ID NO: 6862 - RNA, 22 nt, Artificial Sequence
  Description of Artificial Sequence: Synthetic oligonucleotide
uccuuggguuuguucuggacca

SEQ ID NO: 6863 - RNA, 22 nt, Artificial Sequence
  Description of Artificial Sequence: Synthetic oligonucleotide
ccuuggguuuguucuggaccac

SEQ ID NO: 6864 - RNA, 22 nt, Artificial Sequence
  Description of Artificial Sequence: Synthetic oligonucleotide
gguuuguucuggaccacgucug

SEQ ID NO: 6865 - RNA, 22 nt, Artificial Sequence
  Description of Artificial Sequence: Synthetic oligonucleotide
guuuguucuggaccacgucugc

SEQ ID NO: 6866 - RNA, 22 nt, Artificial Sequence
  Description of Artificial Sequence: Synthetic oligonucleotide
uggguuuguucuggaccacguc

SEQ ID NO: 6867 - RNA, 22 nt, Artificial Sequence
  Description of Artificial Sequence: Synthetic oligonucleotide
ggguuuguucuggaccacgucu

SEQ ID NO: 6868 - RNA, 22 nt, Artificial Sequence
  Description of Artificial Sequence: Synthetic oligonucleotide
uuuccuuggguuuguucuggac

SEQ ID NO: 6869 - RNA, 22 nt, Artificial Sequence
  Description of Artificial Sequence: Synthetic oligonucleotide
uuccuuggguuuguucuggacc

SEQ ID NO: 6870 - RNA, 22 nt, Artificial Sequence
  Description of Artificial Sequence: Synthetic oligonucleotide
acauguaccuacccagaaaacu

SEQ ID NO: 6871 - RNA, 22 nt, Artificial Sequence
  Description of Artificial Sequence: Synthetic oligonucleotide
gacauguaccuacccagaaaac

SEQ ID NO: 6872 - RNA, 22 nt, Artificial Sequence
  Description of Artificial Sequence: Synthetic oligonucleotide
guguacauagccucauaaaacu

SEQ ID NO: 6873 - RNA, 22 nt, Artificial Sequence
  Description of Artificial Sequence: Synthetic oligonucleotide
uguacauagccucauaaaacuc

SEQ ID NO: 6874 - RNA, 22 nt, Artificial Sequence
  Description of Artificial Sequence: Synthetic oligonucleotide
guguguacauagccucauaaaa

SEQ ID NO: 6875 - RNA, 22 nt, Artificial Sequence
  Description of Artificial Sequence: Synthetic oligonucleotide
uguguacauagccucauaaaac

SEQ ID NO: 6876 - RNA, 22 nt, Artificial Sequence
  Description of Artificial Sequence: Synthetic oligonucleotide
cgguguguacauagccucauaa

SEQ ID NO: 6877 - RNA, 22 nt, Artificial Sequence
  Description of Artificial Sequence: Synthetic oligonucleotide
gguguguacauagccucauaaa

SEQ ID NO: 6878 - RNA, 22 nt, Artificial Sequence
  Description of Artificial Sequence: Synthetic oligonucleotide
ugcgguguguacauagccucau

SEQ ID NO: 6879 - RNA, 22 nt, Artificial Sequence
  Description of Artificial Sequence: Synthetic oligonucleotide
gcgguguguacauagccucaua

SEQ ID NO: 6880 - RNA, 22 nt, Artificial Sequence
  Description of Artificial Sequence: Synthetic oligonucleotide
uaugcgguguguacauagccuc

SEQ ID NO: 6881 - RNA, 22 nt, Artificial Sequence
  Description of Artificial Sequence: Synthetic oligonucleotide
augcgguguguacauagccuca

SEQ ID NO: 6882 - RNA, 22 nt, Artificial Sequence
  Description of Artificial Sequence: Synthetic oligonucleotide
aguucguuuauguguaauguaa

SEQ ID NO: 6883 - RNA, 22 nt, Artificial Sequence
  Description of Artificial Sequence: Synthetic oligonucleotide
guucguuuauguguaauguaau

SEQ ID NO: 6884 - RNA, 22 nt, Artificial Sequence
  Description of Artificial Sequence: Synthetic oligonucleotide
cguuuauguguaauguaauuug

SEQ ID NO: 6885 - RNA, 22 nt, Artificial Sequence
  Description of Artificial Sequence: Synthetic oligonucleotide
guuuauguguaauguaauuuga

SEQ ID NO: 6886 - RNA, 22 nt, Artificial Sequence
  Description of Artificial Sequence: Synthetic oligonucleotide
uucguuuauguguaauguaauu

SEQ ID NO: 6887 - RNA, 22 nt, Artificial Sequence
  Description of Artificial Sequence: Synthetic oligonucleotide
ucguuuauguguaauguaauuu

SEQ ID NO: 6888 - RNA, 22 nt, Artificial Sequence
  Description of Artificial Sequence: Synthetic oligonucleotide
uauguguaauguaauuugacuc

SEQ ID NO: 6889 - RNA, 22 nt, Artificial Sequence
  Description of Artificial Sequence: Synthetic oligonucleotide
auguguaauguaauuugacucc

SEQ ID NO: 6890 - RNA, 22 nt, Artificial Sequence
  Description of Artificial Sequence: Synthetic oligonucleotide
uuuauguguaauguaauuugac

SEQ ID NO: 6891 - RNA, 22 nt, Artificial Sequence
  Description of Artificial Sequence: Synthetic oligonucleotide
uuauguguaauguaauuugacu

SEQ ID NO: 6892 - RNA, 22 nt, Artificial Sequence
  Description of Artificial Sequence: Synthetic oligonucleotide
ccgaaacgaaugaguacauaag

SEQ ID NO: 6893 - RNA, 22 nt, Artificial Sequence
  Description of Artificial Sequence: Synthetic oligonucleotide
cgaaacgaaugaguacauaagu

SEQ ID NO: 6894 - RNA, 22 nt, Artificial Sequence
  Description of Artificial Sequence: Synthetic oligonucleotide
aaugaguacauaaguucguacu

SEQ ID NO: 6895 - RNA, 22 nt, Artificial Sequence
  Description of Artificial Sequence: Synthetic oligonucleotide
augaguacauaaguucguacuc

SEQ ID NO: 6896 - RNA, 22 nt, Artificial Sequence
  Description of Artificial Sequence: Synthetic oligonucleotide
cgaaugaguacauaaguucgua

SEQ ID NO: 6897 - RNA, 22 nt, Artificial Sequence
  Description of Artificial Sequence: Synthetic oligonucleotide
gaaugaguacauaaguucguac

SEQ ID NO: 6898 - RNA, 22 nt, Artificial Sequence
  Description of Artificial Sequence: Synthetic oligonucleotide
aacgaaugaguacauaaguucg

SEQ ID NO: 6899 - RNA, 22 nt, Artificial Sequence
  Description of Artificial Sequence: Synthetic oligonucleotide
acgaaugaguacauaaguucgu

SEQ ID NO: 6900 - RNA, 22 nt, Artificial Sequence
  Description of Artificial Sequence: Synthetic oligonucleotide
gaaacgaaugaguacauaaguu

SEQ ID NO: 6901 - RNA, 22 nt, Artificial Sequence
  Description of Artificial Sequence: Synthetic oligonucleotide
aaacgaaugaguacauaaguuc

SEQ ID NO: 6902 - RNA, 22 nt, Artificial Sequence
  Description of Artificial Sequence: Synthetic oligonucleotide
ggccaauguuuguaaucaguuc

SEQ ID NO: 6903 - RNA, 22 nt, Artificial Sequence
  Description of Artificial Sequence: Synthetic oligonucleotide
cggccaauguuuguaaucaguu

SEQ ID NO: 6904 - RNA, 22 nt, Artificial Sequence
  Description of Artificial Sequence: Synthetic oligonucleotide
gcggccaauguuuguaaucagu

SEQ ID NO: 6905 - RNA, 22 nt, Artificial Sequence
  Description of Artificial Sequence: Synthetic oligonucleotide
ugcggccaauguuuguaaucag

SEQ ID NO: 6906 - RNA, 22 nt, Artificial Sequence
  Description of Artificial Sequence: Synthetic oligonucleotide
uugcggccaauguuuguaauca

SEQ ID NO: 6907 - RNA, 22 nt, Artificial Sequence
  Description of Artificial Sequence: Synthetic oligonucleotide
uuugcggccaauguuuguaauc

SEQ ID NO: 6908 - RNA, 22 nt, Artificial Sequence
  Description of Artificial Sequence: Synthetic oligonucleotide
auuugcggccaauguuuguaau

SEQ ID NO: 6909 - RNA, 22 nt, Artificial Sequence
  Description of Artificial Sequence: Synthetic oligonucleotide
aauuugcggccaauguuuguaa

SEQ ID NO: 6910 - RNA, 22 nt, Artificial Sequence
  Description of Artificial Sequence: Synthetic oligonucleotide
caauuugcggccaauguuugua

SEQ ID NO: 6911 - RNA, 22 nt, Artificial Sequence
  Description of Artificial Sequence: Synthetic oligonucleotide
gcaauuugcggccaauguuugu

SEQ ID NO: 6912 - RNA, 22 nt, Artificial Sequence
  Description of Artificial Sequence: Synthetic oligonucleotide
uaaacaacagcaucaccauagu

SEQ ID NO: 6913 - RNA, 22 nt, Artificial Sequence
  Description of Artificial Sequence: Synthetic oligonucleotide
aacaacagcaucaccauaguca

SEQ ID NO: 6914 - RNA, 22 nt, Artificial Sequence
  Description of Artificial Sequence: Synthetic oligonucleotide
ucaucacuaauaaauguacuac

SEQ ID NO: 6915 - RNA, 22 nt, Artificial Sequence
  Description of Artificial Sequence: Synthetic oligonucleotide
uucaucacuaauaaauguacua

SEQ ID NO: 6916 - RNA, 22 nt, Artificial Sequence
  Description of Artificial Sequence: Synthetic oligonucleotide
aucacuaauaaauguacuacca

SEQ ID NO: 6917 - RNA, 22 nt, Artificial Sequence
  Description of Artificial Sequence: Synthetic oligonucleotide
caucacuaauaaauguacuacc

SEQ ID NO: 6918 - RNA, 22 nt, Artificial Sequence
  Description of Artificial Sequence: Synthetic oligonucleotide
ucacuaauaaauguacuaccag

SEQ ID NO: 6919 - RNA, 22 nt, Artificial Sequence
  Description of Artificial Sequence: Synthetic oligonucleotide
agguauaauucuacuacauuua

SEQ ID NO: 6920 - RNA, 22 nt, Artificial Sequence
  Description of Artificial Sequence: Synthetic oligonucleotide
aacaggcaaacugaguuggacg

SEQ ID NO: 6921 - RNA, 22 nt, Artificial Sequence
  Description of Artificial Sequence: Synthetic oligonucleotide
acaggcaaacugaguuggacgu

SEQ ID NO: 6922 - RNA, 22 nt, Artificial Sequence
  Description of Artificial Sequence: Synthetic oligonucleotide
caggcaaacugaguuggacgug

SEQ ID NO: 6923 - RNA, 22 nt, Artificial Sequence
  Description of Artificial Sequence: Synthetic oligonucleotide
guuugaugaacacauagggcug

SEQ ID NO: 6924 - RNA, 22 nt, Artificial Sequence
  Description of Artificial Sequence: Synthetic oligonucleotide
uuugaugaacacauagggcugu

SEQ ID NO: 6925 - RNA, 22 nt, Artificial Sequence
  Description of Artificial Sequence: Synthetic oligonucleotide
aacacauagggcuguucaaguu

SEQ ID NO: 6926 - RNA, 22 nt, Artificial Sequence
  Description of Artificial Sequence: Synthetic oligonucleotide
acacauagggcuguucaaguug

SEQ ID NO: 6927 - RNA, 22 nt, Artificial Sequence
  Description of Artificial Sequence: Synthetic oligonucleotide
ugaacacauagggcuguucaag

SEQ ID NO: 6928 - RNA, 22 nt, Artificial Sequence
  Description of Artificial Sequence: Synthetic oligonucleotide
gaacacauagggcuguucaagu

SEQ ID NO: 6929 - RNA, 22 nt, Artificial Sequence
  Description of Artificial Sequence: Synthetic oligonucleotide
gaugaacacauagggcuguuca

SEQ ID NO: 6930 - RNA, 22 nt, Artificial Sequence
  Description of Artificial Sequence: Synthetic oligonucleotide
augaacacauagggcuguucaa

SEQ ID NO: 6931 - RNA, 22 nt, Artificial Sequence
  Description of Artificial Sequence: Synthetic oligonucleotide
uugaugaacacauagggcuguu

SEQ ID NO: 6932 - RNA, 22 nt, Artificial Sequence
  Description of Artificial Sequence: Synthetic oligonucleotide
ugaugaacacauagggcuguuc

SEQ ID NO: 6933 - RNA, 22 nt, Artificial Sequence
  Description of Artificial Sequence: Synthetic oligonucleotide
aaggucucuaucagacauuaug

SEQ ID NO: 6934 - RNA, 22 nt, Artificial Sequence
  Description of Artificial Sequence: Synthetic oligonucleotide
aggucucuaucagacauuaugc

SEQ ID NO: 6935 - RNA, 22 nt, Artificial Sequence
  Description of Artificial Sequence: Synthetic oligonucleotide
uaaaggucucuaucagacauua

SEQ ID NO: 6936 - RNA, 22 nt, Artificial Sequence
  Description of Artificial Sequence: Synthetic oligonucleotide
aaaggucucuaucagacauuau

SEQ ID NO: 6937 - RNA, 22 nt, Artificial Sequence
  Description of Artificial Sequence: Synthetic oligonucleotide
ucucuaucagacauuaugcaaa

SEQ ID NO: 6938 - RNA, 22 nt, Artificial Sequence
  Description of Artificial Sequence: Synthetic oligonucleotide
ggucucuaucagacauuaugca

SEQ ID NO: 6939 - RNA, 22 nt, Artificial Sequence
  Description of Artificial Sequence: Synthetic oligonucleotide
cauaaaggucucuaucagacau

SEQ ID NO: 6940 - RNA, 22 nt, Artificial Sequence
  Description of Artificial Sequence: Synthetic oligonucleotide
auaaaggucucuaucagacauu

SEQ ID NO: 6941 - RNA, 22 nt, Artificial Sequence
  Description of Artificial Sequence: Synthetic oligonucleotide
auaguaguugucugauaucaca

SEQ ID NO: 6942 - RNA, 22 nt, Artificial Sequence
  Description of Artificial Sequence: Synthetic oligonucleotide
uaguaguugucugauaucacac

SEQ ID NO: 6943 - RNA, 22 nt, Artificial Sequence
  Description of Artificial Sequence: Synthetic oligonucleotide
guugucugauaucacacauugu

SEQ ID NO: 6944 - RNA, 22 nt, Artificial Sequence
  Description of Artificial Sequence: Synthetic oligonucleotide
ugucugauaucacacauuguug

SEQ ID NO: 6945 - RNA, 22 nt, Artificial Sequence
  Description of Artificial Sequence: Synthetic oligonucleotide
gucugauaucacacauuguugg

SEQ ID NO: 6946 - RNA, 22 nt, Artificial Sequence
  Description of Artificial Sequence: Synthetic oligonucleotide
aguaguugucugauaucacaca

SEQ ID NO: 6947 - RNA, 22 nt, Artificial Sequence
  Description of Artificial Sequence: Synthetic oligonucleotide
guaguugucugauaucacacau

SEQ ID NO: 6948 - RNA, 22 nt, Artificial Sequence
  Description of Artificial Sequence: Synthetic oligonucleotide
uaguugucugauaucacacauu

SEQ ID NO: 6949 - RNA, 22 nt, Artificial Sequence
  Description of Artificial Sequence: Synthetic oligonucleotide
aguugucugauaucacacauug

SEQ ID NO: 6950 - RNA, 22 nt, Artificial Sequence
  Description of Artificial Sequence: Synthetic oligonucleotide
acaucacaaccuggagcauugc

SEQ ID NO: 6951 - RNA, 22 nt, Artificial Sequence
  Description of Artificial Sequence: Synthetic oligonucleotide
gacaucacaaccuggagcauug

SEQ ID NO: 6952 - RNA, 22 nt, Artificial Sequence
  Description of Artificial Sequence: Synthetic oligonucleotide
ugacaucacaaccuggagcauu

SEQ ID NO: 6953 - RNA, 22 nt, Artificial Sequence
  Description of Artificial Sequence: Synthetic oligonucleotide
ccuguuugcgcaucuguuauga

SEQ ID NO: 6954 - RNA, 22 nt, Artificial Sequence
  Description of Artificial Sequence: Synthetic oligonucleotide
cuguuugcgcaucuguuaugaa

SEQ ID NO: 6955 - RNA, 22 nt, Artificial Sequence
  Description of Artificial Sequence: Synthetic oligonucleotide
uguuugcgcaucuguuaugaaa

SEQ ID NO: 6956 - RNA, 22 nt, Artificial Sequence
  Description of Artificial Sequence: Synthetic oligonucleotide
guuugcgcaucuguuaugaaau

SEQ ID NO: 6957 - RNA, 22 nt, Artificial Sequence
  Description of Artificial Sequence: Synthetic oligonucleotide
gugacaucacaaccuggagcau

SEQ ID NO: 6958 - RNA, 22 nt, Artificial Sequence
  Description of Artificial Sequence: Synthetic oligonucleotide
gcaucacccaacuagcaggcau

SEQ ID NO: 6959 - RNA, 22 nt, Artificial Sequence
  Description of Artificial Sequence: Synthetic oligonucleotide
acgcaucacccaacuagcaggc

SEQ ID NO: 6960 - RNA, 22 nt, Artificial Sequence
  Description of Artificial Sequence: Synthetic oligonucleotide
cgcaucacccaacuagcaggca

SEQ ID NO: 6961 - RNA, 22 nt, Artificial Sequence
  Description of Artificial Sequence: Synthetic oligonucleotide
auacgcaucacccaacuagcag

SEQ ID NO: 6962 - RNA, 22 nt, Artificial Sequence
  Description of Artificial Sequence: Synthetic oligonucleotide
uacgcaucacccaacuagcagg

SEQ ID NO: 6963 - RNA, 22 nt, Artificial Sequence
  Description of Artificial Sequence: Synthetic oligonucleotide
gguaaacaccagauggugaacc

SEQ ID NO: 6964 - RNA, 22 nt, Artificial Sequence
  Description of Artificial Sequence: Synthetic oligonucleotide
uaaacaccagauggugaaccau

SEQ ID NO: 6965 - RNA, 22 nt, Artificial Sequence
  Description of Artificial Sequence: Synthetic oligonucleotide
guaaacaccagauggugaacca

SEQ ID NO: 6966 - RNA, 22 nt, Artificial Sequence
  Description of Artificial Sequence: Synthetic oligonucleotide
aacaccagauggugaaccauug

SEQ ID NO: 6967 - RNA, 22 nt, Artificial Sequence
  Description of Artificial Sequence: Synthetic oligonucleotide
aaacaccagauggugaaccauu

SEQ ID NO: 6968 - RNA, 22 nt, Artificial Sequence
  Description of Artificial Sequence: Synthetic oligonucleotide
caccagauggugaaccauugua

SEQ ID NO: 6969 - RNA, 22 nt, Artificial Sequence
  Description of Artificial Sequence: Synthetic oligonucleotide
acaccagauggugaaccauugu

SEQ ID NO: 6970 - RNA, 22 nt, Artificial Sequence
  Description of Artificial Sequence: Synthetic oligonucleotide
ccagauggugaaccauuguaac

SEQ ID NO: 6971 - RNA, 22 nt, Artificial Sequence
  Description of Artificial Sequence: Synthetic oligonucleotide
accagauggugaaccauuguaa

SEQ ID NO: 6972 - RNA, 22 nt, Artificial Sequence
  Description of Artificial Sequence: Synthetic oligonucleotide
uucucacuagugguccaaaacu

SEQ ID NO: 6973 - RNA, 22 nt, Artificial Sequence
  Description of Artificial Sequence: Synthetic oligonucleotide
uuucucacuagugguccaaaac

SEQ ID NO: 6974 - RNA, 22 nt, Artificial Sequence
  Description of Artificial Sequence: Synthetic oligonucleotide
acucacagugucaacaauuuca

SEQ ID NO: 6975 - RNA, 22 nt, Artificial Sequence
  Description of Artificial Sequence: Synthetic oligonucleotide
cacucacagugucaacaauuuc

SEQ ID NO: 6976 - RNA, 22 nt, Artificial Sequence
  Description of Artificial Sequence: Synthetic oligonucleotide
cagcaggaagaagagucacagu

SEQ ID NO: 6977 - RNA, 22 nt, Artificial Sequence
  Description of Artificial Sequence: Synthetic oligonucleotide
gcagcaggaagaagagucacag

SEQ ID NO: 6978 - RNA, 22 nt, Artificial Sequence
  Description of Artificial Sequence: Synthetic oligonucleotide
guagugcguuuaucuaguaaua

SEQ ID NO: 6979 - RNA, 22 nt, Artificial Sequence
  Description of Artificial Sequence: Synthetic oligonucleotide
acacccgguugccacgcuugac

SEQ ID NO: 6980 - RNA, 22 nt, Artificial Sequence
  Description of Artificial Sequence: Synthetic oligonucleotide
aacacccgguugccacgcuuga

SEQ ID NO: 6981 - RNA, 22 nt, Artificial Sequence
  Description of Artificial Sequence: Synthetic oligonucleotide
cacccgguugccacgcuugacu

SEQ ID NO: 6982 - RNA, 22 nt, Artificial Sequence
  Description of Artificial Sequence: Synthetic oligonucleotide
aaaaacagcaagaagugcaacg

SEQ ID NO: 6983 - RNA, 22 nt, Artificial Sequence
  Description of Artificial Sequence: Synthetic oligonucleotide
aacagcaagaagugcaacgcca

SEQ ID NO: 6984 - RNA, 22 nt, Artificial Sequence
  Description of Artificial Sequence: Synthetic oligonucleotide
acagcaagaagugcaacgccaa

SEQ ID NO: 6985 - RNA, 22 nt, Artificial Sequence
  Description of Artificial Sequence: Synthetic oligonucleotide
uguggugguugguaaagaacau

SEQ ID NO: 6986 - RNA, 22 nt, Artificial Sequence
  Description of Artificial Sequence: Synthetic oligonucleotide
ugcucauguucacggcagcagu

SEQ ID NO: 6987 - RNA, 22 nt, Artificial Sequence
  Description of Artificial Sequence: Synthetic oligonucleotide
augcucauguucacggcagcag

SEQ ID NO: 6988 - RNA, 22 nt, Artificial Sequence
  Description of Artificial Sequence: Synthetic oligonucleotide
caugcucauguucacggcagca

SEQ ID NO: 6989 - RNA, 22 nt, Artificial Sequence
  Description of Artificial Sequence: Synthetic oligonucleotide
ucaugcucauguucacggcagc

SEQ ID NO: 6990 - RNA, 22 nt, Artificial Sequence
  Description of Artificial Sequence: Synthetic oligonucleotide
gcucauguucacggcagcagua

SEQ ID NO: 6991 - RNA, 22 nt, Artificial Sequence
  Description of Artificial Sequence: Synthetic oligonucleotide
uucaugcucauguucacggcag

SEQ ID NO: 6992 - RNA, 22 nt, Artificial Sequence
  Description of Artificial Sequence: Synthetic oligonucleotide
uuucaugcucauguucacggca

SEQ ID NO: 6993 - RNA, 22 nt, Artificial Sequence
  Description of Artificial Sequence: Synthetic oligonucleotide
uaaguaucaaauuguuuguaaa

SEQ ID NO: 6994 - RNA, 22 nt, Artificial Sequence
  Description of Artificial Sequence: Synthetic oligonucleotide
aaguaucaaauuguuuguaaac

SEQ ID NO: 6995 - RNA, 22 nt, Artificial Sequence
  Description of Artificial Sequence: Synthetic oligonucleotide
uauaaguaucaaauuguuugua

SEQ ID NO: 6996 - RNA, 22 nt, Artificial Sequence
  Description of Artificial Sequence: Synthetic oligonucleotide
auaaguaucaaauuguuuguaa

SEQ ID NO: 6997 - RNA, 22 nt, Artificial Sequence
  Description of Artificial Sequence: Synthetic oligonucleotide
uaucaaauuguuuguaaaccca

SEQ ID NO: 6998 - RNA, 22 nt, Artificial Sequence
  Description of Artificial Sequence: Synthetic oligonucleotide
aguaucaaauuguuuguaaacc

SEQ ID NO: 6999 - RNA, 22 nt, Artificial Sequence
  Description of Artificial Sequence: Synthetic oligonucleotide
guaucaaauuguuuguaaaccc

SEQ ID NO: 7000 - RNA, 22 nt, Artificial Sequence
  Description of Artificial Sequence: Synthetic oligonucleotide
guuauaaguaucaaauuguuug

SEQ ID NO: 7001 - RNA, 22 nt, Artificial Sequence
  Description of Artificial Sequence: Synthetic oligonucleotide
uuauaaguaucaaauuguuugu

SEQ ID NO: 7002 - RNA, 22 nt, Artificial Sequence
  Description of Artificial Sequence: Synthetic oligonucleotide
guggcggcuauugauuucaaua

SEQ ID NO: 7003 - RNA, 22 nt, Artificial Sequence
  Description of Artificial Sequence: Synthetic oligonucleotide
aguggcggcuauugauuucaau

SEQ ID NO: 7004 - RNA, 22 nt, Artificial Sequence
  Description of Artificial Sequence: Synthetic oligonucleotide
uaguggcggcuauugauuucaa

SEQ ID NO: 7005 - RNA, 22 nt, Artificial Sequence
  Description of Artificial Sequence: Synthetic oligonucleotide
cuaguggcggcuauugauuuca

SEQ ID NO: 7006 - RNA, 22 nt, Artificial Sequence
  Description of Artificial Sequence: Synthetic oligonucleotide
cggcuauugauuucaauaauuu

SEQ ID NO: 7007 - RNA, 22 nt, Artificial Sequence
  Description of Artificial Sequence: Synthetic oligonucleotide
gcggcuauugauuucaauaauu

SEQ ID NO: 7008 - RNA, 22 nt, Artificial Sequence
  Description of Artificial Sequence: Synthetic oligonucleotide
ggcggcuauugauuucaauaau

SEQ ID NO: 7009 - RNA, 22 nt, Artificial Sequence
  Description of Artificial Sequence: Synthetic oligonucleotide
uggcggcuauugauuucaauaa

SEQ ID NO: 7010 - RNA, 22 nt, Artificial Sequence
  Description of Artificial Sequence: Synthetic oligonucleotide
ucuaguggcggcuauugauuuc

SEQ ID NO: 7011 - RNA, 22 nt, Artificial Sequence
  Description of Artificial Sequence: Synthetic oligonucleotide
cucuaguggcggcuauugauuu

SEQ ID NO: 7012 - RNA, 22 nt, Artificial Sequence
  Description of Artificial Sequence: Synthetic oligonucleotide
uagcacaaguuguagguauuug

SEQ ID NO: 7013 - RNA, 22 nt, Artificial Sequence
  Description of Artificial Sequence: Synthetic oligonucleotide
caagacgcaguauuauugggua

SEQ ID NO: 7014 - RNA, 22 nt, Artificial Sequence
  Description of Artificial Sequence: Synthetic oligonucleotide
ccaagacgcaguauuauugggu

SEQ ID NO: 7015 - RNA, 22 nt, Artificial Sequence
  Description of Artificial Sequence: Synthetic oligonucleotide
cacaaccuggagcauugcaaac

SEQ ID NO: 7016 - RNA, 22 nt, Artificial Sequence
  Description of Artificial Sequence: Synthetic oligonucleotide
aaguaaucauaaacaccaagag

SEQ ID NO: 7017 - RNA, 22 nt, Artificial Sequence
  Description of Artificial Sequence: Synthetic oligonucleotide
aguaaucauaaacaccaagagu

SEQ ID NO: 7018 - RNA, 22 nt, Artificial Sequence
  Description of Artificial Sequence: Synthetic oligonucleotide
cacgauaaccaguaaagacaua

SEQ ID NO: 7019 - RNA, 22 nt, Artificial Sequence
  Description of Artificial Sequence: Synthetic oligonucleotide
uaaccaguaaagacauaauuuc

SEQ ID NO: 7020 - RNA, 22 nt, Artificial Sequence
  Description of Artificial Sequence: Synthetic oligonucleotide
gauaaccaguaaagacauaauu

SEQ ID NO: 7021 - RNA, 22 nt, Artificial Sequence
  Description of Artificial Sequence: Synthetic oligonucleotide
caaguuuguaauauuaggaaau

SEQ ID NO: 7022 - RNA, 22 nt, Artificial Sequence
  Description of Artificial Sequence: Synthetic oligonucleotide
aaguuuguaauauuaggaaauc

SEQ ID NO: 7023 - RNA, 22 nt, Artificial Sequence
  Description of Artificial Sequence: Synthetic oligonucleotide
cacaaguuuguaauauuaggaa

SEQ ID NO: 7024 - RNA, 22 nt, Artificial Sequence
  Description of Artificial Sequence: Synthetic oligonucleotide
acaaguuuguaauauuaggaaa

SEQ ID NO: 7025 - RNA, 22 nt, Artificial Sequence
  Description of Artificial Sequence: Synthetic oligonucleotide
ggcacaaguuuguaauauuagg

SEQ ID NO: 7026 - RNA, 22 nt, Artificial Sequence
  Description of Artificial Sequence: Synthetic oligonucleotide
agggcacaaguuuguaauauua

SEQ ID NO: 7027 - RNA, 22 nt, Artificial Sequence
  Description of Artificial Sequence: Synthetic oligonucleotide
gggcacaaguuuguaauauuag

SEQ ID NO: 7028 - RNA, 22 nt, Artificial Sequence
  Description of Artificial Sequence: Synthetic oligonucleotide
aaagggcacaaguuuguaauau

SEQ ID NO: 7029 - RNA, 22 nt, Artificial Sequence
  Description of Artificial Sequence: Synthetic oligonucleotide
aagggcacaaguuuguaauauu

SEQ ID NO: 7030 - RNA, 22 nt, Artificial Sequence
  Description of Artificial Sequence: Synthetic oligonucleotide
caggacaacgccgacaaguucc

SEQ ID NO: 7031 - RNA, 22 nt, Artificial Sequence
  Description of Artificial Sequence: Synthetic oligonucleotide
gcaggacaacgccgacaaguuc

SEQ ID NO: 7032 - RNA, 22 nt, Artificial Sequence
  Description of Artificial Sequence: Synthetic oligonucleotide
agcaggacaacgccgacaaguu

SEQ ID NO: 7033 - RNA, 22 nt, Artificial Sequence
  Description of Artificial Sequence: Synthetic oligonucleotide
cagcaggacaacgccgacaagu

SEQ ID NO: 7034 - RNA, 22 nt, Artificial Sequence
  Description of Artificial Sequence: Synthetic oligonucleotide
ucagcaggacaacgccgacaag

SEQ ID NO: 7035 - RNA, 22 nt, Artificial Sequence
  Description of Artificial Sequence: Synthetic oligonucleotide
uagaccagaagaucaggaacuc

SEQ ID NO: 7036 - RNA, 22 nt, Artificial Sequence
  Description of Artificial Sequence: Synthetic oligonucleotide
uuagaccagaagaucaggaacu

SEQ ID NO: 7037 - RNA, 22 nt, Artificial Sequence
  Description of Artificial Sequence: Synthetic oligonucleotide
agaccagaagaucaggaacucu

SEQ ID NO: 7038 - RNA, 22 nt, Artificial Sequence
  Description of Artificial Sequence: Synthetic oligonucleotide
agcauuucaguagugccaccag

SEQ ID NO: 7039 - RNA, 22 nt, Artificial Sequence
  Description of Artificial Sequence: Synthetic oligonucleotide
cuuuauuaccguucuuacgaag

SEQ ID NO: 7040 - RNA, 22 nt, Artificial Sequence
  Description of Artificial Sequence: Synthetic oligonucleotide
ccuuuauuaccguucuuacgaa

SEQ ID NO: 7041 - RNA, 22 nt, Artificial Sequence
  Description of Artificial Sequence: Synthetic oligonucleotide
uccuuuauuaccguucuuacga

SEQ ID NO: 7042 - RNA, 22 nt, Artificial Sequence
  Description of Artificial Sequence: Synthetic oligonucleotide
cuccuuuauuaccguucuuacg

SEQ ID NO: 7043 - RNA, 22 nt, Artificial Sequence
  Description of Artificial Sequence: Synthetic oligonucleotide
auuaccguucuuacgaagaaga

SEQ ID NO: 7044 - RNA, 22 nt, Artificial Sequence
  Description of Artificial Sequence: Synthetic oligonucleotide
uauuaccguucuuacgaagaag

SEQ ID NO: 7045 - RNA, 22 nt, Artificial Sequence
  Description of Artificial Sequence: Synthetic oligonucleotide
uuauuaccguucuuacgaagaa

SEQ ID NO: 7046 - RNA, 22 nt, Artificial Sequence
  Description of Artificial Sequence: Synthetic oligonucleotide
uuuauuaccguucuuacgaaga

SEQ ID NO: 7047 - RNA, 22 nt, Artificial Sequence
  Description of Artificial Sequence: Synthetic oligonucleotide
gcuccuuuauuaccguucuuac

SEQ ID NO: 7048 - RNA, 22 nt, Artificial Sequence
  Description of Artificial Sequence: Synthetic oligonucleotide
auagcuucuucgcgggugauaa

SEQ ID NO: 7049 - RNA, 22 nt, Artificial Sequence
  Description of Artificial Sequence: Synthetic oligonucleotide
uagcuucuucgcgggugauaaa

SEQ ID NO: 7050 - RNA, 22 nt, Artificial Sequence
  Description of Artificial Sequence: Synthetic oligonucleotide
uauagcuucuucgcgggugaua

SEQ ID NO: 7051 - RNA, 22 nt, Artificial Sequence
  Description of Artificial Sequence: Synthetic oligonucleotide
cucuaccaucaaaaaagacagu

SEQ ID NO: 7052 - RNA, 22 nt, Artificial Sequence
  Description of Artificial Sequence: Synthetic oligonucleotide
acucuaccaucaaaaaagacag

SEQ ID NO: 7053 - RNA, 22 nt, Artificial Sequence
  Description of Artificial Sequence: Synthetic oligonucleotide
cauauaggcagcucucccuagc

SEQ ID NO: 7054 - RNA, 22 nt, Artificial Sequence
  Description of Artificial Sequence: Synthetic oligonucleotide
ccauauaggcagcucucccuag

SEQ ID NO: 7055 - RNA, 22 nt, Artificial Sequence
  Description of Artificial Sequence: Synthetic oligonucleotide
uccauauaggcagcucucccua

SEQ ID NO: 7056 - RNA, 22 nt, Artificial Sequence
  Description of Artificial Sequence: Synthetic oligonucleotide
uuccauauaggcagcucucccu

SEQ ID NO: 7057 - RNA, 22 nt, Artificial Sequence
  Description of Artificial Sequence: Synthetic oligonucleotide
cuuccauauaggcagcucuccc

SEQ ID NO: 7058 - RNA, 22 nt, Artificial Sequence
  Description of Artificial Sequence: Synthetic oligonucleotide
aaucaguuccuugucugauuag

SEQ ID NO: 7059 - RNA, 22 nt, Artificial Sequence
  Description of Artificial Sequence: Synthetic oligonucleotide
aggaauagcagaaaggcuaaaa

SEQ ID NO: 7060 - RNA, 22 nt, Artificial Sequence
  Description of Artificial Sequence: Synthetic oligonucleotide
ggaauagcagaaaggcuaaaaa

SEQ ID NO: 7061 - RNA, 22 nt, Artificial Sequence
  Description of Artificial Sequence: Synthetic oligonucleotide
caaggaauagcagaaaggcuaa

SEQ ID NO: 7062 - RNA, 22 nt, Artificial Sequence
  Description of Artificial Sequence: Synthetic oligonucleotide
aaggaauagcagaaaggcuaaa

SEQ ID NO: 7063 - RNA, 22 nt, Artificial Sequence
  Description of Artificial Sequence: Synthetic oligonucleotide
aacaaggaauagcagaaaggcu

SEQ ID NO: 7064 - RNA, 22 nt, Artificial Sequence
  Description of Artificial Sequence: Synthetic oligonucleotide
acaaggaauagcagaaaggcua

SEQ ID NO: 7065 - RNA, 22 nt, Artificial Sequence
  Description of Artificial Sequence: Synthetic oligonucleotide
aaacaaggaauagcagaaaggc

SEQ ID NO: 7066 - RNA, 22 nt, Artificial Sequence
  Description of Artificial Sequence: Synthetic oligonucleotide
uuaaaacaaggaauagcagaaa

SEQ ID NO: 7067 - RNA, 22 nt, Artificial Sequence
  Description of Artificial Sequence: Synthetic oligonucleotide
uaaaacaaggaauagcagaaag

SEQ ID NO: 7068 - RNA, 22 nt, Artificial Sequence
  Description of Artificial Sequence: Synthetic oligonucleotide
ggugaauugcccucguauguuc

SEQ ID NO: 7069 - RNA, 22 nt, Artificial Sequence
  Description of Artificial Sequence: Synthetic oligonucleotide
uggugaauugcccucguauguu

SEQ ID NO: 7070 - RNA, 22 nt, Artificial Sequence
  Description of Artificial Sequence: Synthetic oligonucleotide
ugaauugcccucguauguucca

SEQ ID NO: 7071 - RNA, 22 nt, Artificial Sequence
  Description of Artificial Sequence: Synthetic oligonucleotide
gugaauugcccucguauguucc

SEQ ID NO: 7072 - RNA, 22 nt, Artificial Sequence
  Description of Artificial Sequence: Synthetic oligonucleotide
aaauggugaauugcccucguau

SEQ ID NO: 7073 - RNA, 22 nt, Artificial Sequence
  Description of Artificial Sequence: Synthetic oligonucleotide
gaaauggugaauugcccucgua

SEQ ID NO: 7074 - RNA, 22 nt, Artificial Sequence
  Description of Artificial Sequence: Synthetic oligonucleotide
auggugaauugcccucguaugu

SEQ ID NO: 7075 - RNA, 22 nt, Artificial Sequence
  Description of Artificial Sequence: Synthetic oligonucleotide
aauggugaauugcccucguaug

SEQ ID NO: 7076 - RNA, 22 nt, Artificial Sequence
  Description of Artificial Sequence: Synthetic oligonucleotide
ugaaauggugaauugcccucgu

SEQ ID NO: 7077 - RNA, 22 nt, Artificial Sequence
  Description of Artificial Sequence: Synthetic oligonucleotide
augaaauggugaauugcccucg

SEQ ID NO: 7078 - RNA, 22 nt, Artificial Sequence
  Description of Artificial Sequence: Synthetic oligonucleotide
uucuauagagacacucauaaag

SEQ ID NO: 7079 - RNA, 22 nt, Artificial Sequence
  Description of Artificial Sequence: Synthetic oligonucleotide
uuucuauagagacacucauaaa

SEQ ID NO: 7080 - RNA, 22 nt, Artificial Sequence
  Description of Artificial Sequence: Synthetic oligonucleotide
cuauuucuauagagacacucau

SEQ ID NO: 7081 - RNA, 22 nt, Artificial Sequence
  Description of Artificial Sequence: Synthetic oligonucleotide
ucuauuucuauagagacacuca

SEQ ID NO: 7082 - RNA, 22 nt, Artificial Sequence
  Description of Artificial Sequence: Synthetic oligonucleotide
auuucuauagagacacucauaa

SEQ ID NO: 7083 - RNA, 22 nt, Artificial Sequence
  Description of Artificial Sequence: Synthetic oligonucleotide
uauuucuauagagacacucaua

SEQ ID NO: 7084 - RNA, 22 nt, Artificial Sequence
  Description of Artificial Sequence: Synthetic oligonucleotide
cucuauuucuauagagacacuc

SEQ ID NO: 7085 - RNA, 22 nt, Artificial Sequence
  Description of Artificial Sequence: Synthetic oligonucleotide
ucucuauuucuauagagacacu

SEQ ID NO: 7086 - RNA, 22 nt, Artificial Sequence
  Description of Artificial Sequence: Synthetic oligonucleotide
ugaaagacaucagcauacuccu

SEQ ID NO: 7087 - RNA, 22 nt, Artificial Sequence
  Description of Artificial Sequence: Synthetic oligonucleotide
gaaagacaucagcauacuccug

SEQ ID NO: 7088 - RNA, 22 nt, Artificial Sequence
  Description of Artificial Sequence: Synthetic oligonucleotide
agacaucagcauacuccugauu

SEQ ID NO: 7089 - RNA, 22 nt, Artificial Sequence
  Description of Artificial Sequence: Synthetic oligonucleotide
gacaucagcauacuccugauua

SEQ ID NO: 7090 - RNA, 22 nt, Artificial Sequence
  Description of Artificial Sequence: Synthetic oligonucleotide
aaagacaucagcauacuccuga

SEQ ID NO: 7091 - RNA, 22 nt, Artificial Sequence
  Description of Artificial Sequence: Synthetic oligonucleotide
aagacaucagcauacuccugau

SEQ ID NO: 7092 - RNA, 22 nt, Artificial Sequence
  Description of Artificial Sequence: Synthetic oligonucleotide
aucagcauacuccugauuagga

SEQ ID NO: 7093 - RNA, 22 nt, Artificial Sequence
  Description of Artificial Sequence: Synthetic oligonucleotide
ucagcauacuccugauuaggau

SEQ ID NO: 7094 - RNA, 22 nt, Artificial Sequence
  Description of Artificial Sequence: Synthetic oligonucleotide
acaucagcauacuccugauuag

SEQ ID NO: 7095 - RNA, 22 nt, Artificial Sequence
  Description of Artificial Sequence: Synthetic oligonucleotide
caucagcauacuccugauuagg

SEQ ID NO: 7096 - RNA, 22 nt, Artificial Sequence
  Description of Artificial Sequence: Synthetic oligonucleotide
agaaaacucaucugagauauug

SEQ ID NO: 7097 - RNA, 22 nt, Artificial Sequence
  Description of Artificial Sequence: Synthetic oligonucleotide
gaaaacucaucugagauauuga

SEQ ID NO: 7098 - RNA, 22 nt, Artificial Sequence
  Description of Artificial Sequence: Synthetic oligonucleotide
aaaacucaucugagauauugag

SEQ ID NO: 7099 - RNA, 22 nt, Artificial Sequence
  Description of Artificial Sequence: Synthetic oligonucleotide
aaacucaucugagauauugagu

SEQ ID NO: 7100 - RNA, 22 nt, Artificial Sequence
  Description of Artificial Sequence: Synthetic oligonucleotide
cuagaaaacucaucugagauau

SEQ ID NO: 7101 - RNA, 22 nt, Artificial Sequence
  Description of Artificial Sequence: Synthetic oligonucleotide
uagaaaacucaucugagauauu

SEQ ID NO: 7102 - RNA, 22 nt, Artificial Sequence
  Description of Artificial Sequence: Synthetic oligonucleotide
uauguuugcgagcaagaacaag

SEQ ID NO: 7103 - RNA, 22 nt, Artificial Sequence
  Description of Artificial Sequence: Synthetic oligonucleotide
auguuugcgagcaagaacaagu

SEQ ID NO: 7104 - RNA, 22 nt, Artificial Sequence
  Description of Artificial Sequence: Synthetic oligonucleotide
guauguuugcgagcaagaacaa

SEQ ID NO: 7105 - RNA, 22 nt, Artificial Sequence
  Description of Artificial Sequence: Synthetic oligonucleotide
uuugcgagcaagaacaagugag

SEQ ID NO: 7106 - RNA, 22 nt, Artificial Sequence
  Description of Artificial Sequence: Synthetic oligonucleotide
uugcgagcaagaacaagugagg

SEQ ID NO: 7107 - RNA, 22 nt, Artificial Sequence
  Description of Artificial Sequence: Synthetic oligonucleotide
uguuugcgagcaagaacaagug

SEQ ID NO: 7108 - RNA, 22 nt, Artificial Sequence
  Description of Artificial Sequence: Synthetic oligonucleotide
guuugcgagcaagaacaaguga

SEQ ID NO: 7109 - RNA, 22 nt, Artificial Sequence
  Description of Artificial Sequence: Synthetic oligonucleotide
uugcagaugaaacaucaugcgu

SEQ ID NO: 7110 - RNA, 22 nt, Artificial Sequence
  Description of Artificial Sequence: Synthetic oligonucleotide
auugcagaugaaacaucaugcg

SEQ ID NO: 7111 - RNA, 22 nt, Artificial Sequence
  Description of Artificial Sequence: Synthetic oligonucleotide
uaauugcagaugaaacaucaug

SEQ ID NO: 7112 - RNA, 22 nt, Artificial Sequence
  Description of Artificial Sequence: Synthetic oligonucleotide
uuaauugcagaugaaacaucau

SEQ ID NO: 7113 - RNA, 22 nt, Artificial Sequence
  Description of Artificial Sequence: Synthetic oligonucleotide
uguuaauugcagaugaaacauc

SEQ ID NO: 7114 - RNA, 22 nt, Artificial Sequence
  Description of Artificial Sequence: Synthetic oligonucleotide
cuguuaauugcagaugaaacau

SEQ ID NO: 7115 - RNA, 22 nt, Artificial Sequence
  Description of Artificial Sequence: Synthetic oligonucleotide
ccaauauuuaaaauaacgguca

SEQ ID NO: 7116 - RNA, 22 nt, Artificial Sequence
  Description of Artificial Sequence: Synthetic oligonucleotide
caauauuuaaaauaacggucaa

SEQ ID NO: 7117 - RNA, 22 nt, Artificial Sequence
  Description of Artificial Sequence: Synthetic oligonucleotide
aauauuuaaaauaacggucaaa

SEQ ID NO: 7118 - RNA, 22 nt, Artificial Sequence
  Description of Artificial Sequence: Synthetic oligonucleotide
auauuuaaaauaacggucaaag

SEQ ID NO: 7119 - RNA, 22 nt, Artificial Sequence
  Description of Artificial Sequence: Synthetic oligonucleotide
uauuuaaaauaacggucaaaga

SEQ ID NO: 7120 - RNA, 22 nt, Artificial Sequence
  Description of Artificial Sequence: Synthetic oligonucleotide
auuuaaaauaacggucaaagag

SEQ ID NO: 7121 - RNA, 22 nt, Artificial Sequence
  Description of Artificial Sequence: Synthetic oligonucleotide
ucccaauauuuaaaauaacggu

SEQ ID NO: 7122 - RNA, 22 nt, Artificial Sequence
  Description of Artificial Sequence: Synthetic oligonucleotide
cccaauauuuaaaauaacgguc

SEQ ID NO: 7123 - RNA, 22 nt, Artificial Sequence
  Description of Artificial Sequence: Synthetic oligonucleotide
gcaccaccuaaauugcaacgug

SEQ ID NO: 7124 - RNA, 22 nt, Artificial Sequence
  Description of Artificial Sequence: Synthetic oligonucleotide
agcaccaccuaaauugcaacgu

SEQ ID NO: 7125 - RNA, 22 nt, Artificial Sequence
  Description of Artificial Sequence: Synthetic oligonucleotide
cagcaccaccuaaauugcaacg

SEQ ID NO: 7126 - RNA, 22 nt, Artificial Sequence
  Description of Artificial Sequence: Synthetic oligonucleotide
acagcaccaccuaaauugcaac

SEQ ID NO: 7127 - RNA, 22 nt, Artificial Sequence
  Description of Artificial Sequence: Synthetic oligonucleotide
agacagcaccaccuaaauugca

SEQ ID NO: 7128 - RNA, 22 nt, Artificial Sequence
  Description of Artificial Sequence: Synthetic oligonucleotide
cagacagcaccaccuaaauugc

SEQ ID NO: 7129 - RNA, 22 nt, Artificial Sequence
  Description of Artificial Sequence: Synthetic oligonucleotide
cacuaauggcauacuuaagauu

SEQ ID NO: 7130 - RNA, 22 nt, Artificial Sequence
  Description of Artificial Sequence: Synthetic oligonucleotide
acuaauggcauacuuaagauuc

SEQ ID NO: 7131 - RNA, 22 nt, Artificial Sequence
  Description of Artificial Sequence: Synthetic oligonucleotide
cuaauggcauacuuaagauuca

SEQ ID NO: 7132 - RNA, 22 nt, Artificial Sequence
  Description of Artificial Sequence: Synthetic oligonucleotide
uaauggcauacuuaagauucau

SEQ ID NO: 7133 - RNA, 22 nt, Artificial Sequence
  Description of Artificial Sequence: Synthetic oligonucleotide
aauggcauacuuaagauucauu

SEQ ID NO: 7134 - RNA, 22 nt, Artificial Sequence
  Description of Artificial Sequence: Synthetic oligonucleotide
auggcauacuuaagauucauuu

SEQ ID NO: 7135 - RNA, 22 nt, Artificial Sequence
  Description of Artificial Sequence: Synthetic oligonucleotide
uggcauacuuaagauucauuug

SEQ ID NO: 7136 - RNA, 22 nt, Artificial Sequence
  Description of Artificial Sequence: Synthetic oligonucleotide
ggcauacuuaagauucauuuga

SEQ ID NO: 7137 - RNA, 22 nt, Artificial Sequence
  Description of Artificial Sequence: Synthetic oligonucleotide
ugcacuaauggcauacuuaaga

SEQ ID NO: 7138 - RNA, 22 nt, Artificial Sequence
  Description of Artificial Sequence: Synthetic oligonucleotide
gcacuaauggcauacuuaagau

SEQ ID NO: 7139 - RNA, 22 nt, Artificial Sequence
  Description of Artificial Sequence: Synthetic oligonucleotide
uaccaguguguguacacaacau

SEQ ID NO: 7140 - RNA, 22 nt, Artificial Sequence
  Description of Artificial Sequence: Synthetic oligonucleotide
accaguguguguacacaacauc

SEQ ID NO: 7141 - RNA, 22 nt, Artificial Sequence
  Description of Artificial Sequence: Synthetic oligonucleotide
aguguguguacacaacaucuua

SEQ ID NO: 7142 - RNA, 22 nt, Artificial Sequence
  Description of Artificial Sequence: Synthetic oligonucleotide
guguguguacacaacaucuuaa

SEQ ID NO: 7143 - RNA, 22 nt, Artificial Sequence
  Description of Artificial Sequence: Synthetic oligonucleotide
ccaguguguguacacaacaucu

SEQ ID NO: 7144 - RNA, 22 nt, Artificial Sequence
  Description of Artificial Sequence: Synthetic oligonucleotide
caguguguguacacaacaucuu

SEQ ID NO: 7145 - RNA, 22 nt, Artificial Sequence
  Description of Artificial Sequence: Synthetic oligonucleotide
uguguacacaacaucuuaacac

SEQ ID NO: 7146 - RNA, 22 nt, Artificial Sequence
  Description of Artificial Sequence: Synthetic oligonucleotide
guguacacaacaucuuaacaca

SEQ ID NO: 7147 - RNA, 22 nt, Artificial Sequence
  Description of Artificial Sequence: Synthetic oligonucleotide
uguguguacacaacaucuuaac

SEQ ID NO: 7148 - RNA, 22 nt, Artificial Sequence
  Description of Artificial Sequence: Synthetic oligonucleotide
guguguacacaacaucuuaaca

SEQ ID NO: 7149 - RNA, 22 nt, Artificial Sequence
  Description of Artificial Sequence: Synthetic oligonucleotide
ccaauuaaaaaugcuucagaug

SEQ ID NO: 7150 - RNA, 22 nt, Artificial Sequence
  Description of Artificial Sequence: Synthetic oligonucleotide
caauuaaaaaugcuucagauga

SEQ ID NO: 7151 - RNA, 22 nt, Artificial Sequence
  Description of Artificial Sequence: Synthetic oligonucleotide
aauuaaaaaugcuucagaugau

SEQ ID NO: 7152 - RNA, 22 nt, Artificial Sequence
  Description of Artificial Sequence: Synthetic oligonucleotide
auuaaaaaugcuucagaugaug

SEQ ID NO: 7153 - RNA, 22 nt, Artificial Sequence
  Description of Artificial Sequence: Synthetic oligonucleotide
cagguauaauucuacuacauuu

SEQ ID NO: 7154 - RNA, 22 nt, Artificial Sequence
  Description of Artificial Sequence: Synthetic oligonucleotide
gcagguauaauucuacuacauu

SEQ ID NO: 7155 - RNA, 22 nt, Artificial Sequence
  Description of Artificial Sequence: Synthetic oligonucleotide
acaaccauuaguuuggcugcug

SEQ ID NO: 7156 - RNA, 22 nt, Artificial Sequence
  Description of Artificial Sequence: Synthetic oligonucleotide
caaccauuaguuuggcugcugu

SEQ ID NO: 7157 - RNA, 22 nt, Artificial Sequence
  Description of Artificial Sequence: Synthetic oligonucleotide
cccuaauguuacacacugauua

SEQ ID NO: 7158 - RNA, 22 nt, Artificial Sequence
  Description of Artificial Sequence: Synthetic oligonucleotide
ccuaauguuacacacugauuaa

SEQ ID NO: 7159 - RNA, 22 nt, Artificial Sequence
  Description of Artificial Sequence: Synthetic oligonucleotide
aaugugguggcucuuucaaguc

SEQ ID NO: 7160 - RNA, 22 nt, Artificial Sequence
  Description of Artificial Sequence: Synthetic oligonucleotide
ucccuaauguuacacacugauu

SEQ ID NO: 7161 - RNA, 22 nt, Artificial Sequence
  Description of Artificial Sequence: Synthetic oligonucleotide
aauguuacacacugauuaaaga

SEQ ID NO: 7162 - RNA, 22 nt, Artificial Sequence
  Description of Artificial Sequence: Synthetic oligonucleotide
auguuacacacugauuaaagau

SEQ ID NO: 7163 - RNA, 22 nt, Artificial Sequence
  Description of Artificial Sequence: Synthetic oligonucleotide
cuaauguuacacacugauuaaa

SEQ ID NO: 7164 - RNA, 22 nt, Artificial Sequence
  Description of Artificial Sequence: Synthetic oligonucleotide
uaauguuacacacugauuaaag

SEQ ID NO: 7165 - RNA, 22 nt, Artificial Sequence
  Description of Artificial Sequence: Synthetic oligonucleotide
aaaaugugguggcucuuucaag

SEQ ID NO: 7166 - RNA, 22 nt, Artificial Sequence
  Description of Artificial Sequence: Synthetic oligonucleotide
aaaugugguggcucuuucaagu

SEQ ID NO: 7167 - RNA, 22 nt, Artificial Sequence
  Description of Artificial Sequence: Synthetic oligonucleotide
agcaggagaaguuccccuacug

SEQ ID NO: 7168 - RNA, 22 nt, Artificial Sequence
  Description of Artificial Sequence: Synthetic oligonucleotide
aaacccuuagacacagcaaagu

SEQ ID NO: 7169 - RNA, 22 nt, Artificial Sequence
  Description of Artificial Sequence: Synthetic oligonucleotide
gaaacccuuagacacagcaaag

SEQ ID NO: 7170 - RNA, 22 nt, Artificial Sequence
  Description of Artificial Sequence: Synthetic oligonucleotide
agaaacccuuagacacagcaaa

SEQ ID NO: 7171 - RNA, 22 nt, Artificial Sequence
  Description of Artificial Sequence: Synthetic oligonucleotide
aagaaacccuuagacacagcaa

SEQ ID NO: 7172 - RNA, 22 nt, Artificial Sequence
  Description of Artificial Sequence: Synthetic oligonucleotide
aaagaaacccuuagacacagca

SEQ ID NO: 7173 - RNA, 22 nt, Artificial Sequence
  Description of Artificial Sequence: Synthetic oligonucleotide
uaaagaaacccuuagacacagc

SEQ ID NO: 7174 - RNA, 22 nt, Artificial Sequence
  Description of Artificial Sequence: Synthetic oligonucleotide
cuuaaagaaacccuuagacaca

SEQ ID NO: 7175 - RNA, 22 nt, Artificial Sequence
  Description of Artificial Sequence: Synthetic oligonucleotide
ccuuaaagaaacccuuagacac

SEQ ID NO: 7176 - RNA, 22 nt, Artificial Sequence
  Description of Artificial Sequence: Synthetic oligonucleotide
uccuuaaagaaacccuuagaca

SEQ ID NO: 7177 - RNA, 22 nt, Artificial Sequence
  Description of Artificial Sequence: Synthetic oligonucleotide
cauuaagaucugaaucgacaag

SEQ ID NO: 7178 - RNA, 22 nt, Artificial Sequence
  Description of Artificial Sequence: Synthetic oligonucleotide
ucauuaagaucugaaucgacaa

SEQ ID NO: 7179 - RNA, 22 nt, Artificial Sequence
  Description of Artificial Sequence: Synthetic oligonucleotide
auuaagaucugaaucgacaagc

SEQ ID NO: 7180 - RNA, 22 nt, Artificial Sequence
  Description of Artificial Sequence: Synthetic oligonucleotide
ccuaagaaacaauaaacuagca

SEQ ID NO: 7181 - RNA, 22 nt, Artificial Sequence
  Description of Artificial Sequence: Synthetic oligonucleotide
gccuaagaaacaauaaacuagc

SEQ ID NO: 7182 - RNA, 22 nt, Artificial Sequence
  Description of Artificial Sequence: Synthetic oligonucleotide
agccuaagaaacaauaaacuag

SEQ ID NO: 7183 - RNA, 22 nt, Artificial Sequence
  Description of Artificial Sequence: Synthetic oligonucleotide
uagccuaagaaacaauaaacua

SEQ ID NO: 7184 - RNA, 22 nt, Artificial Sequence
  Description of Artificial Sequence: Synthetic oligonucleotide
auagccuaagaaacaauaaacu

SEQ ID NO: 7185 - RNA, 22 nt, Artificial Sequence
  Description of Artificial Sequence: Synthetic oligonucleotide
aauagccuaagaaacaauaaac

SEQ ID NO: 7186 - RNA, 22 nt, Artificial Sequence
  Description of Artificial Sequence: Synthetic oligonucleotide
aaauagccuaagaaacaauaaa

SEQ ID NO: 7187 - RNA, 22 nt, Artificial Sequence
  Description of Artificial Sequence: Synthetic oligonucleotide
aaaauagccuaagaaacaauaa

SEQ ID NO: 7188 - RNA, 22 nt, Artificial Sequence
  Description of Artificial Sequence: Synthetic oligonucleotide
aaaaauagccuaagaaacaaua

SEQ ID NO: 7189 - RNA, 22 nt, Artificial Sequence
  Description of Artificial Sequence: Synthetic oligonucleotide
caaaaauagccuaagaaacaau

SEQ ID NO: 7190 - RNA, 22 nt, Artificial Sequence
  Description of Artificial Sequence: Synthetic oligonucleotide
gucauuaagaucugaaucgaca

SEQ ID NO: 7191 - RNA, 22 nt, Artificial Sequence
  Description of Artificial Sequence: Synthetic oligonucleotide
uaguagcagcaagauuagcaga

SEQ ID NO: 7192 - RNA, 22 nt, Artificial Sequence
  Description of Artificial Sequence: Synthetic oligonucleotide
auuauuggguaaaccuuggggc

SEQ ID NO: 7193 - RNA, 22 nt, Artificial Sequence
  Description of Artificial Sequence: Synthetic oligonucleotide
uauuauuggguaaaccuugggg

SEQ ID NO: 7194 - RNA, 22 nt, Artificial Sequence
  Description of Artificial Sequence: Synthetic oligonucleotide
augagguuccaccugguuuaac

SEQ ID NO: 7195 - RNA, 22 nt, Artificial Sequence
  Description of Artificial Sequence: Synthetic oligonucleotide
gaugagguuccaccugguuuaa

SEQ ID NO: 7196 - RNA, 22 nt, Artificial Sequence
  Description of Artificial Sequence: Synthetic oligonucleotide
ugagguuccaccugguuuaaca

SEQ ID NO: 7197 - RNA, 22 nt, Artificial Sequence
  Description of Artificial Sequence: Synthetic oligonucleotide
caguauuauuggguaaaccuug

SEQ ID NO: 7198 - RNA, 22 nt, Artificial Sequence
  Description of Artificial Sequence: Synthetic oligonucleotide
gcaguauuauuggguaaaccuu

SEQ ID NO: 7199 - RNA, 22 nt, Artificial Sequence
  Description of Artificial Sequence: Synthetic oligonucleotide
cacuugaaauugcaccaaaauu

SEQ ID NO: 7200 - RNA, 22 nt, Artificial Sequence
  Description of Artificial Sequence: Synthetic oligonucleotide
acacuugaaauugcaccaaaau

SEQ ID NO: 7201 - RNA, 22 nt, Artificial Sequence
  Description of Artificial Sequence: Synthetic oligonucleotide
cuugaaauugcaccaaaauugg

SEQ ID NO: 7202 - RNA, 22 nt, Artificial Sequence
  Description of Artificial Sequence: Synthetic oligonucleotide
acuugaaauugcaccaaaauug

SEQ ID NO: 7203 - RNA, 22 nt, Artificial Sequence
  Description of Artificial Sequence: Synthetic oligonucleotide
aacacuugaaauugcaccaaaa

SEQ ID NO: 7204-8000 - skipped (797 entries)

SEQ ID NO: 8001 - RNA, 22 nt, Unknown
  Description of Unknown: Target viral genome RNA sequence
cuacauacuacuuauuugauga

SEQ ID NO: 8002 - RNA, 22 nt, Unknown
  Description of Unknown: Target viral genome RNA sequence
gcuacauacuacuuauuugaug

SEQ ID NO: 8003 - RNA, 22 nt, Unknown
  Description of Unknown: Target viral genome RNA sequence
acugcuuaugcuaauaguguuu

SEQ ID NO: 8004 - RNA, 22 nt, Unknown
  Description of Unknown: Target viral genome RNA sequence
cugcuuaugcuaauaguguuuu

SEQ ID NO: 8005 - RNA, 22 nt, Unknown
  Description of Unknown: Target viral genome RNA sequence
gccacaacugcuuaugcuaaua

SEQ ID NO: 8006 - RNA, 22 nt, Unknown
  Description of Unknown: Target viral genome RNA sequence
ccacaacugcuuaugcuaauag

SEQ ID NO: 8007 - RNA, 22 nt, Unknown
  Description of Unknown: Target viral genome RNA sequence
augccacaacugcuuaugcuaa

SEQ ID NO: 8008 - RNA, 22 nt, Unknown
  Description of Unknown: Target viral genome RNA sequence
ugccacaacugcuuaugcuaau

SEQ ID NO: 8009 - RNA, 22 nt, Unknown
  Description of Unknown: Target viral genome RNA sequence
caacugcuuaugcuaauagugu

SEQ ID NO: 8010 - RNA, 22 nt, Unknown
  Description of Unknown: Target viral genome RNA sequence
aacugcuuaugcuaauaguguu

SEQ ID NO: 8011 - RNA, 22 nt, Unknown
  Description of Unknown: Target viral genome RNA sequence
cacaacugcuuaugcuaauagu

SEQ ID NO: 8012 - RNA, 22 nt, Unknown
  Description of Unknown: Target viral genome RNA sequence
acaacugcuuaugcuaauagug

SEQ ID NO: 8013 - RNA, 22 nt, Unknown
  Description of Unknown: Target viral genome RNA sequence
ggcuaugccuucgaacauaucg

SEQ ID NO: 8014 - RNA, 22 nt, Unknown
  Description of Unknown: Target viral genome RNA sequence
gcuaugccuucgaacauaucgu

SEQ ID NO: 8015 - RNA, 22 nt, Unknown
  Description of Unknown: Target viral genome RNA sequence
uaauaaaugggguaaggcuaga

SEQ ID NO: 8016 - RNA, 22 nt, Unknown
  Description of Unknown: Target viral genome RNA sequence
uuaauaaaugggguaaggcuag

SEQ ID NO: 8017 - RNA, 22 nt, Unknown
  Description of Unknown: Target viral genome RNA sequence
uuuaauaaaugggguaaggcua

SEQ ID NO: 8018 - RNA, 22 nt, Unknown
  Description of Unknown: Target viral genome RNA sequence
auuuaauaaaugggguaaggcu

SEQ ID NO: 8019 - RNA, 22 nt, Unknown
  Description of Unknown: Target viral genome RNA sequence
cauuuaauaaaugggguaaggc

SEQ ID NO: 8020 - RNA, 22 nt, Unknown
  Description of Unknown: Target viral genome RNA sequence
ccauuuaauaaaugggguaagg

SEQ ID NO: 8021 - RNA, 22 nt, Unknown
  Description of Unknown: Target viral genome RNA sequence
uccauuuaauaaaugggguaag

SEQ ID NO: 8022 - RNA, 22 nt, Unknown
  Description of Unknown: Target viral genome RNA sequence
uuccauuuaauaaaugggguaa

SEQ ID NO: 8023 - RNA, 22 nt, Unknown
  Description of Unknown: Target viral genome RNA sequence
auaaaugggguaaggcuagacu

SEQ ID NO: 8024 - RNA, 22 nt, Unknown
  Description of Unknown: Target viral genome RNA sequence
aauaaaugggguaaggcuagac

SEQ ID NO: 8025 - RNA, 22 nt, Unknown
  Description of Unknown: Target viral genome RNA sequence
aggcuauguacacaccgcauac

SEQ ID NO: 8026 - RNA, 22 nt, Unknown
  Description of Unknown: Target viral genome RNA sequence
ggcuauguacacaccgcauaca

SEQ ID NO: 8027 - RNA, 22 nt, Unknown
  Description of Unknown: Target viral genome RNA sequence
gcuauguacacaccgcauacag

SEQ ID NO: 8028 - RNA, 22 nt, Unknown
  Description of Unknown: Target viral genome RNA sequence
cuauguacacaccgcauacagu

SEQ ID NO: 8029 - RNA, 22 nt, Unknown
  Description of Unknown: Target viral genome RNA sequence
uauguacacaccgcauacaguc

SEQ ID NO: 8030 - RNA, 22 nt, Unknown
  Description of Unknown: Target viral genome RNA sequence
auguacacaccgcauacagucu

SEQ ID NO: 8031 - RNA, 22 nt, Unknown
  Description of Unknown: Target viral genome RNA sequence
uguacacaccgcauacagucuu

SEQ ID NO: 8032 - RNA, 22 nt, Unknown
  Description of Unknown: Target viral genome RNA sequence
guauguggaaagguuauggcug

SEQ ID NO: 8033 - RNA, 22 nt, Unknown
  Description of Unknown: Target viral genome RNA sequence
gguauguggaaagguuauggcu

SEQ ID NO: 8034 - RNA, 22 nt, Unknown
  Description of Unknown: Target viral genome RNA sequence
ccgucugcgguauguggaaagg

SEQ ID NO: 8035 - RNA, 22 nt, Unknown
  Description of Unknown: Target viral genome RNA sequence
gucugcgguauguggaaagguu

SEQ ID NO: 8036 - RNA, 22 nt, Unknown
  Description of Unknown: Target viral genome RNA sequence
ugcgguauguggaaagguuaug

SEQ ID NO: 8037 - RNA, 22 nt, Unknown
  Description of Unknown: Target viral genome RNA sequence
cugcgguauguggaaagguuau

SEQ ID NO: 8038 - RNA, 22 nt, Unknown
  Description of Unknown: Target viral genome RNA sequence
cgguauguggaaagguuauggc

SEQ ID NO: 8039 - RNA, 22 nt, Unknown
  Description of Unknown: Target viral genome RNA sequence
gcgguauguggaaagguuaugg

SEQ ID NO: 8040 - RNA, 22 nt, Unknown
  Description of Unknown: Target viral genome RNA sequence
gacgaauucgugguggugacgg

SEQ ID NO: 8041 - RNA, 22 nt, Unknown
  Description of Unknown: Target viral genome RNA sequence
aacacacguccaacucaguuug

SEQ ID NO: 8042 - RNA, 22 nt, Unknown
  Description of Unknown: Target viral genome RNA sequence
acacacguccaacucaguuugc

SEQ ID NO: 8043 - RNA, 22 nt, Unknown
  Description of Unknown: Target viral genome RNA sequence
aaacacacguccaacucaguuu

SEQ ID NO: 8044 - RNA, 22 nt, Unknown
  Description of Unknown: Target viral genome RNA sequence
cacacguccaacucaguuugcc

SEQ ID NO: 8045 - RNA, 22 nt, Unknown
  Description of Unknown: Target viral genome RNA sequence
acacguccaacucaguuugccu

SEQ ID NO: 8046 - RNA, 22 nt, Unknown
  Description of Unknown: Target viral genome RNA sequence
acauguuccucggaacuugucg

SEQ ID NO: 8047 - RNA, 22 nt, Unknown
  Description of Unknown: Target viral genome RNA sequence
ccagacauguuccucggaacuu

SEQ ID NO: 8048 - RNA, 22 nt, Unknown
  Description of Unknown: Target viral genome RNA sequence
gacauguuccucggaacuuguc

SEQ ID NO: 8049 - RNA, 22 nt, Unknown
  Description of Unknown: Target viral genome RNA sequence
agacauguuccucggaacuugu

SEQ ID NO: 8050 - RNA, 22 nt, Unknown
  Description of Unknown: Target viral genome RNA sequence
caacaacacaguuuaugauccu

SEQ ID NO: 8051 - RNA, 22 nt, Unknown
  Description of Unknown: Target viral genome RNA sequence
ucaacaacacaguuuaugaucc

SEQ ID NO: 8052 - RNA, 22 nt, Unknown
  Description of Unknown: Target viral genome RNA sequence
auggaaccuaguaauagguuuc

SEQ ID NO: 8053 - RNA, 22 nt, Unknown
  Description of Unknown: Target viral genome RNA sequence
cucuugugcagaaugaauucuc

SEQ ID NO: 8054 - RNA, 22 nt, Unknown
  Description of Unknown: Target viral genome RNA sequence
acucuugugcagaaugaauucu

SEQ ID NO: 8055 - RNA, 22 nt, Unknown
  Description of Unknown: Target viral genome RNA sequence
ucuacucuugugcagaaugaau

SEQ ID NO: 8056 - RNA, 22 nt, Unknown
  Description of Unknown: Target viral genome RNA sequence
gucuacucuugugcagaaugaa

SEQ ID NO: 8057 - RNA, 22 nt, Unknown
  Description of Unknown: Target viral genome RNA sequence
uacucuugugcagaaugaauuc

SEQ ID NO: 8058 - RNA, 22 nt, Unknown
  Description of Unknown: Target viral genome RNA sequence
cuacucuugugcagaaugaauu

SEQ ID NO: 8059 - RNA, 22 nt, Unknown
  Description of Unknown: Target viral genome RNA sequence
auagucuacucuugugcagaau

SEQ ID NO: 8060 - RNA, 22 nt, Unknown
  Description of Unknown: Target viral genome RNA sequence
uauagucuacucuugugcagaa

SEQ ID NO: 8061 - RNA, 22 nt, Unknown
  Description of Unknown: Target viral genome RNA sequence
agucuacucuugugcagaauga

SEQ ID NO: 8062 - RNA, 22 nt, Unknown
  Description of Unknown: Target viral genome RNA sequence
uagucuacucuugugcagaaug

SEQ ID NO: 8063 - RNA, 22 nt, Unknown
  Description of Unknown: Target viral genome RNA sequence
ugucugauagagaccuuuauga

SEQ ID NO: 8064 - RNA, 22 nt, Unknown
  Description of Unknown: Target viral genome RNA sequence
gucugauagagaccuuuaugac

SEQ ID NO: 8065 - RNA, 22 nt, Unknown
  Description of Unknown: Target viral genome RNA sequence
ucugauagagaccuuuaugaca

SEQ ID NO: 8066 - RNA, 22 nt, Unknown
  Description of Unknown: Target viral genome RNA sequence
cugauagagaccuuuaugacaa

SEQ ID NO: 8067 - RNA, 22 nt, Unknown
  Description of Unknown: Target viral genome RNA sequence
acagaagugccugccaauucaa

SEQ ID NO: 8068 - RNA, 22 nt, Unknown
  Description of Unknown: Target viral genome RNA sequence
aagugccugccaauucaacugu

SEQ ID NO: 8069 - RNA, 22 nt, Unknown
  Description of Unknown: Target viral genome RNA sequence
gaagugccugccaauucaacug

SEQ ID NO: 8070 - RNA, 22 nt, Unknown
  Description of Unknown: Target viral genome RNA sequence
agaagugccugccaauucaacu

SEQ ID NO: 8071 - RNA, 22 nt, Unknown
  Description of Unknown: Target viral genome RNA sequence
aaaggccaacaacaacaaggcc

SEQ ID NO: 8072 - RNA, 22 nt, Unknown
  Description of Unknown: Target viral genome RNA sequence
uaaaggccaacaacaacaaggc

SEQ ID NO: 8073 - RNA, 22 nt, Unknown
  Description of Unknown: Target viral genome RNA sequence
guaaaggccaacaacaacaagg

SEQ ID NO: 8074 - RNA, 22 nt, Unknown
  Description of Unknown: Target viral genome RNA sequence
gguaaaggccaacaacaacaag

SEQ ID NO: 8075 - RNA, 22 nt, Unknown
  Description of Unknown: Target viral genome RNA sequence
ugguaaaggccaacaacaacaa

SEQ ID NO: 8076 - RNA, 22 nt, Unknown
  Description of Unknown: Target viral genome RNA sequence
cugguaaaggccaacaacaaca

SEQ ID NO: 8077 - RNA, 22 nt, Unknown
  Description of Unknown: Target viral genome RNA sequence
ucugguaaaggccaacaacaac

SEQ ID NO: 8078 - RNA, 22 nt, Unknown
  Description of Unknown: Target viral genome RNA sequence
gucugguaaaggccaacaacaa

SEQ ID NO: 8079 - RNA, 22 nt, Unknown
  Description of Unknown: Target viral genome RNA sequence
aggccaacaacaacaaggccaa

SEQ ID NO: 8080 - RNA, 22 nt, Unknown
  Description of Unknown: Target viral genome RNA sequence
aaggccaacaacaacaaggcca

SEQ ID NO: 8081 - RNA, 22 nt, Unknown
  Description of Unknown: Target viral genome RNA sequence
cuucuugcuguuuuucagagcg

SEQ ID NO: 8082 - RNA, 22 nt, Unknown
  Description of Unknown: Target viral genome RNA sequence
acuucuugcuguuuuucagagc

SEQ ID NO: 8083 - RNA, 22 nt, Unknown
  Description of Unknown: Target viral genome RNA sequence
ucuugcuguuuuucagagcgcu

SEQ ID NO: 8084 - RNA, 22 nt, Unknown
  Description of Unknown: Target viral genome RNA sequence
uucuugcuguuuuucagagcgc

SEQ ID NO: 8085 - RNA, 22 nt, Unknown
  Description of Unknown: Target viral genome RNA sequence
ugcacuucuugcuguuuuucag

SEQ ID NO: 8086 - RNA, 22 nt, Unknown
  Description of Unknown: Target viral genome RNA sequence
uugcacuucuugcuguuuuuca

SEQ ID NO: 8087 - RNA, 22 nt, Unknown
  Description of Unknown: Target viral genome RNA sequence
cacuucuugcuguuuuucagag

SEQ ID NO: 8088 - RNA, 22 nt, Unknown
  Description of Unknown: Target viral genome RNA sequence
gcacuucuugcuguuuuucaga

SEQ ID NO: 8089 - RNA, 22 nt, Unknown
  Description of Unknown: Target viral genome RNA sequence
uugcuguuuuucagagcgcuuc

SEQ ID NO: 8090 - RNA, 22 nt, Unknown
  Description of Unknown: Target viral genome RNA sequence
cuugcuguuuuucagagcgcuu

SEQ ID NO: 8091 - RNA, 22 nt, Unknown
  Description of Unknown: Target viral genome RNA sequence
cagaauguucucuaugagaacc

SEQ ID NO: 8092 - RNA, 22 nt, Unknown
  Description of Unknown: Target viral genome RNA sequence
agaauguucucuaugagaacca

SEQ ID NO: 8093 - RNA, 22 nt, Unknown
  Description of Unknown: Target viral genome RNA sequence
aguugugaucaacuccgcgaac

SEQ ID NO: 8094 - RNA, 22 nt, Unknown
  Description of Unknown: Target viral genome RNA sequence
guugugaucaacuccgcgaacc

SEQ ID NO: 8095 - RNA, 22 nt, Unknown
  Description of Unknown: Target viral genome RNA sequence
guaguugugaucaacuccgcga

SEQ ID NO: 8096 - RNA, 22 nt, Unknown
  Description of Unknown: Target viral genome RNA sequence
uaguugugaucaacuccgcgaa

SEQ ID NO: 8097 - RNA, 22 nt, Unknown
  Description of Unknown: Target viral genome RNA sequence
uugugaucaacuccgcgaaccc

SEQ ID NO: 8098 - RNA, 22 nt, Unknown
  Description of Unknown: Target viral genome RNA sequence
ugugaugguggcaguuuguaug

SEQ ID NO: 8099 - RNA, 22 nt, Unknown
  Description of Unknown: Target viral genome RNA sequence
gugaugguggcaguuuguaugu

SEQ ID NO: 8100 - RNA, 22 nt, Unknown
  Description of Unknown: Target viral genome RNA sequence
gggcaauucaccauuucauccu

SEQ ID NO: 8101 - RNA, 22 nt, Unknown
  Description of Unknown: Target viral genome RNA sequence
ggcaauucaccauuucauccuc

SEQ ID NO: 8102 - RNA, 22 nt, Unknown
  Description of Unknown: Target viral genome RNA sequence
gagggcaauucaccauuucauc

SEQ ID NO: 8103 - RNA, 22 nt, Unknown
  Description of Unknown: Target viral genome RNA sequence
agggcaauucaccauuucaucc

SEQ ID NO: 8104 - RNA, 22 nt, Unknown
  Description of Unknown: Target viral genome RNA sequence
gcaauucaccauuucauccucu

SEQ ID NO: 8105 - RNA, 22 nt, Unknown
  Description of Unknown: Target viral genome RNA sequence
gagacugaccuuacuaaaggac

SEQ ID NO: 8106 - RNA, 22 nt, Unknown
  Description of Unknown: Target viral genome RNA sequence
uggacugagacugaccuuacua

SEQ ID NO: 8107 - RNA, 22 nt, Unknown
  Description of Unknown: Target viral genome RNA sequence
uuggacugagacugaccuuacu

SEQ ID NO: 8108 - RNA, 22 nt, Unknown
  Description of Unknown: Target viral genome RNA sequence
guuggacugagacugaccuuac

SEQ ID NO: 8109 - RNA, 22 nt, Unknown
  Description of Unknown: Target viral genome RNA sequence
uguuggacugagacugaccuua

SEQ ID NO: 8110 - RNA, 22 nt, Unknown
  Description of Unknown: Target viral genome RNA sequence
cugagacugaccuuacuaaagg

SEQ ID NO: 8111 - RNA, 22 nt, Unknown
  Description of Unknown: Target viral genome RNA sequence
acugagacugaccuuacuaaag

SEQ ID NO: 8112 - RNA, 22 nt, Unknown
  Description of Unknown: Target viral genome RNA sequence
gacugagacugaccuuacuaaa

SEQ ID NO: 8113 - RNA, 22 nt, Unknown
  Description of Unknown: Target viral genome RNA sequence
cuacaucacgaacgcuuucuua

SEQ ID NO: 8114 - RNA, 22 nt, Unknown
  Description of Unknown: Target viral genome RNA sequence
uacaucacgaacgcuuucuuau

SEQ ID NO: 8115 - RNA, 22 nt, Unknown
  Description of Unknown: Target viral genome RNA sequence
guugcuacaucacgaacgcuuu

SEQ ID NO: 8116 - RNA, 22 nt, Unknown
  Description of Unknown: Target viral genome RNA sequence
uugcuacaucacgaacgcuuuc

SEQ ID NO: 8117 - RNA, 22 nt, Unknown
  Description of Unknown: Target viral genome RNA sequence
ugcuacaucacgaacgcuuucu

SEQ ID NO: 8118 - RNA, 22 nt, Unknown
  Description of Unknown: Target viral genome RNA sequence
gcuacaucacgaacgcuuucuu

SEQ ID NO: 8119 - RNA, 22 nt, Unknown
  Description of Unknown: Target viral genome RNA sequence
cacuguugcuacaucacgaacg

SEQ ID NO: 8120 - RNA, 22 nt, Unknown
  Description of Unknown: Target viral genome RNA sequence
acuguugcuacaucacgaacgc

SEQ ID NO: 8121 - RNA, 22 nt, Unknown
  Description of Unknown: Target viral genome RNA sequence
cuguugcuacaucacgaacgcu

SEQ ID NO: 8122 - RNA, 22 nt, Unknown
  Description of Unknown: Target viral genome RNA sequence
uguugcuacaucacgaacgcuu

SEQ ID NO: 8123 - RNA, 22 nt, Unknown
  Description of Unknown: Target viral genome RNA sequence
acacuagccauccuuacugcgc

SEQ ID NO: 8124 - RNA, 22 nt, Unknown
  Description of Unknown: Target viral genome RNA sequence
uacacuagccauccuuacugcg

SEQ ID NO: 8125 - RNA, 22 nt, Unknown
  Description of Unknown: Target viral genome RNA sequence
aguuacacuagccauccuuacu

SEQ ID NO: 8126 - RNA, 22 nt, Unknown
  Description of Unknown: Target viral genome RNA sequence
uaguuacacuagccauccuuac

SEQ ID NO: 8127 - RNA, 22 nt, Unknown
  Description of Unknown: Target viral genome RNA sequence
uuacacuagccauccuuacugc

SEQ ID NO: 8128 - RNA, 22 nt, Unknown
  Description of Unknown: Target viral genome RNA sequence
guuacacuagccauccuuacug

SEQ ID NO: 8129 - RNA, 22 nt, Unknown
  Description of Unknown: Target viral genome RNA sequence
ugcuaguuacacuagccauccu

SEQ ID NO: 8130 - RNA, 22 nt, Unknown
  Description of Unknown: Target viral genome RNA sequence
uugcuaguuacacuagccaucc

SEQ ID NO: 8131 - RNA, 22 nt, Unknown
  Description of Unknown: Target viral genome RNA sequence
cuaguuacacuagccauccuua

SEQ ID NO: 8132 - RNA, 22 nt, Unknown
  Description of Unknown: Target viral genome RNA sequence
gcuaguuacacuagccauccuu

SEQ ID NO: 8133 - RNA, 22 nt, Unknown
  Description of Unknown: Target viral genome RNA sequence
aaacaggcuagaucugaggaca

SEQ ID NO: 8134 - RNA, 22 nt, Unknown
  Description of Unknown: Target viral genome RNA sequence
aacaggcuagaucugaggacaa

SEQ ID NO: 8135 - RNA, 22 nt, Unknown
  Description of Unknown: Target viral genome RNA sequence
ugguaccacauauaucacguca

SEQ ID NO: 8136 - RNA, 22 nt, Unknown
  Description of Unknown: Target viral genome RNA sequence
augguaccacauauaucacguc

SEQ ID NO: 8137 - RNA, 22 nt, Unknown
  Description of Unknown: Target viral genome RNA sequence
caugguaccacauauaucacgu

SEQ ID NO: 8138 - RNA, 22 nt, Unknown
  Description of Unknown: Target viral genome RNA sequence
acaugguaccacauauaucacg

SEQ ID NO: 8139 - RNA, 22 nt, Unknown
  Description of Unknown: Target viral genome RNA sequence
accacauauaucacgucaacgu

SEQ ID NO: 8140 - RNA, 22 nt, Unknown
  Description of Unknown: Target viral genome RNA sequence
uaccacauauaucacgucaacg

SEQ ID NO: 8141 - RNA, 22 nt, Unknown
  Description of Unknown: Target viral genome RNA sequence
guaccacauauaucacgucaac

SEQ ID NO: 8142 - RNA, 22 nt, Unknown
  Description of Unknown: Target viral genome RNA sequence
gguaccacauauaucacgucaa

SEQ ID NO: 8143 - RNA, 22 nt, Unknown
  Description of Unknown: Target viral genome RNA sequence
cacauauaucacgucaacgucu

SEQ ID NO: 8144 - RNA, 22 nt, Unknown
  Description of Unknown: Target viral genome RNA sequence
ccacauauaucacgucaacguc

SEQ ID NO: 8145 - RNA, 22 nt, Unknown
  Description of Unknown: Target viral genome RNA sequence
gcuuuucaguagcugcacuuac

SEQ ID NO: 8146 - RNA, 22 nt, Unknown
  Description of Unknown: Target viral genome RNA sequence
ugcuuuucaguagcugcacuua

SEQ ID NO: 8147 - RNA, 22 nt, Unknown
  Description of Unknown: Target viral genome RNA sequence
aguacuuucuuuugaacuucua

SEQ ID NO: 8148 - RNA, 22 nt, Unknown
  Description of Unknown: Target viral genome RNA sequence
caggaguuuucugugguguaga

SEQ ID NO: 8149 - RNA, 22 nt, Unknown
  Description of Unknown: Target viral genome RNA sequence
aggaguuuucugugguguagau

SEQ ID NO: 8150 - RNA, 22 nt, Unknown
  Description of Unknown: Target viral genome RNA sequence
ggaguuuucugugguguagaug

SEQ ID NO: 8151 - RNA, 22 nt, Unknown
  Description of Unknown: Target viral genome RNA sequence
gaguuuucugugguguagaugc

SEQ ID NO: 8152 - RNA, 22 nt, Unknown
  Description of Unknown: Target viral genome RNA sequence
auugccguuuuagauaugugug

SEQ ID NO: 8153 - RNA, 22 nt, Unknown
  Description of Unknown: Target viral genome RNA sequence
aauugccguuuuagauaugugu

SEQ ID NO: 8154 - RNA, 22 nt, Unknown
  Description of Unknown: Target viral genome RNA sequence
ugccguuuuagauaugugugcu

SEQ ID NO: 8155 - RNA, 22 nt, Unknown
  Description of Unknown: Target viral genome RNA sequence
aaacuaauuguugucgcuucca

SEQ ID NO: 8156 - RNA, 22 nt, Unknown
  Description of Unknown: Target viral genome RNA sequence
gaauugccguuuuagauaugug

SEQ ID NO: 8157 - RNA, 22 nt, Unknown
  Description of Unknown: Target viral genome RNA sequence
guuuguuacagacacaccuaaa

SEQ ID NO: 8158 - RNA, 22 nt, Unknown
  Description of Unknown: Target viral genome RNA sequence
uuuguuacagacacaccuaaag

SEQ ID NO: 8159 - RNA, 22 nt, Unknown
  Description of Unknown: Target viral genome RNA sequence
agguuuguuacagacacaccua

SEQ ID NO: 8160 - RNA, 22 nt, Unknown
  Description of Unknown: Target viral genome RNA sequence
gguuuguuacagacacaccuaa

SEQ ID NO: 8161 - RNA, 22 nt, Unknown
  Description of Unknown: Target viral genome RNA sequence
uuguuacagacacaccuaaagg

SEQ ID NO: 8162 - RNA, 22 nt, Unknown
  Description of Unknown: Target viral genome RNA sequence
aauuugauacuuauaaccucug

SEQ ID NO: 8163 - RNA, 22 nt, Unknown
  Description of Unknown: Target viral genome RNA sequence
auuugauacuuauaaccucugg

SEQ ID NO: 8164 - RNA, 22 nt, Unknown
  Description of Unknown: Target viral genome RNA sequence
uuugauacuuauaaccucugga

SEQ ID NO: 8165 - RNA, 22 nt, Unknown
  Description of Unknown: Target viral genome RNA sequence
uugauacuuauaaccucuggaa

SEQ ID NO: 8166 - RNA, 22 nt, Unknown
  Description of Unknown: Target viral genome RNA sequence
aaacaauuugauacuuauaacc

SEQ ID NO: 8167 - RNA, 22 nt, Unknown
  Description of Unknown: Target viral genome RNA sequence
aacaauuugauacuuauaaccu

SEQ ID NO: 8168 - RNA, 22 nt, Unknown
  Description of Unknown: Target viral genome RNA sequence
acaauuugauacuuauaaccuc

SEQ ID NO: 8169 - RNA, 22 nt, Unknown
  Description of Unknown: Target viral genome RNA sequence
caauuugauacuuauaaccucu

SEQ ID NO: 8170 - RNA, 22 nt, Unknown
  Description of Unknown: Target viral genome RNA sequence
ucucuaucuguaguacuaugac

SEQ ID NO: 8171 - RNA, 22 nt, Unknown
  Description of Unknown: Target viral genome RNA sequence
gucucuaucuguaguacuauga

SEQ ID NO: 8172 - RNA, 22 nt, Unknown
  Description of Unknown: Target viral genome RNA sequence
cuggugucucuaucuguaguac

SEQ ID NO: 8173 - RNA, 22 nt, Unknown
  Description of Unknown: Target viral genome RNA sequence
gcuggugucucuaucuguagua

SEQ ID NO: 8174 - RNA, 22 nt, Unknown
  Description of Unknown: Target viral genome RNA sequence
agcuggugucucuaucuguagu

SEQ ID NO: 8175 - RNA, 22 nt, Unknown
  Description of Unknown: Target viral genome RNA sequence
uagcuggugucucuaucuguag

SEQ ID NO: 8176 - RNA, 22 nt, Unknown
  Description of Unknown: Target viral genome RNA sequence
ugucucuaucuguaguacuaug

SEQ ID NO: 8177 - RNA, 22 nt, Unknown
  Description of Unknown: Target viral genome RNA sequence
gugucucuaucuguaguacuau

SEQ ID NO: 8178 - RNA, 22 nt, Unknown
  Description of Unknown: Target viral genome RNA sequence
ggugucucuaucuguaguacua

SEQ ID NO: 8179 - RNA, 22 nt, Unknown
  Description of Unknown: Target viral genome RNA sequence
uggugucucuaucuguaguacu

SEQ ID NO: 8180 - RNA, 22 nt, Unknown
  Description of Unknown: Target viral genome RNA sequence
ccgacgacgacuacuagcgugc

SEQ ID NO: 8181 - RNA, 22 nt, Unknown
  Description of Unknown: Target viral genome RNA sequence
cgacgacgacuacuagcgugcc

SEQ ID NO: 8182 - RNA, 22 nt, Unknown
  Description of Unknown: Target viral genome RNA sequence
augaugaaccgacgacgacuac

SEQ ID NO: 8183 - RNA, 22 nt, Unknown
  Description of Unknown: Target viral genome RNA sequence
ugaugaaccgacgacgacuacu

SEQ ID NO: 8184 - RNA, 22 nt, Unknown
  Description of Unknown: Target viral genome RNA sequence
gaugaaccgacgacgacuacua

SEQ ID NO: 8185 - RNA, 22 nt, Unknown
  Description of Unknown: Target viral genome RNA sequence
augaaccgacgacgacuacuag

SEQ ID NO: 8186 - RNA, 22 nt, Unknown
  Description of Unknown: Target viral genome RNA sequence
ugaaccgacgacgacuacuagc

SEQ ID NO: 8187 - RNA, 22 nt, Unknown
  Description of Unknown: Target viral genome RNA sequence
gaaccgacgacgacuacuagcg

SEQ ID NO: 8188 - RNA, 22 nt, Unknown
  Description of Unknown: Target viral genome RNA sequence
aaccgacgacgacuacuagcgu

SEQ ID NO: 8189 - RNA, 22 nt, Unknown
  Description of Unknown: Target viral genome RNA sequence
accgacgacgacuacuagcgug

SEQ ID NO: 8190 - RNA, 22 nt, Unknown
  Description of Unknown: Target viral genome RNA sequence
ugugaugaugauuauuucaaua

SEQ ID NO: 8191 - RNA, 22 nt, Unknown
  Description of Unknown: Target viral genome RNA sequence
auuguugugaugaugauuauuu

SEQ ID NO: 8192 - RNA, 22 nt, Unknown
  Description of Unknown: Target viral genome RNA sequence
uuguugugaugaugauuauuuc

SEQ ID NO: 8193 - RNA, 22 nt, Unknown
  Description of Unknown: Target viral genome RNA sequence
uguugugaugaugauuauuuca

SEQ ID NO: 8194 - RNA, 22 nt, Unknown
  Description of Unknown: Target viral genome RNA sequence
uacaauuguugugaugaugauu

SEQ ID NO: 8195 - RNA, 22 nt, Unknown
  Description of Unknown: Target viral genome RNA sequence
acaauuguugugaugaugauua

SEQ ID NO: 8196 - RNA, 22 nt, Unknown
  Description of Unknown: Target viral genome RNA sequence
caauuguugugaugaugauuau

SEQ ID NO: 8197 - RNA, 22 nt, Unknown
  Description of Unknown: Target viral genome RNA sequence
aauuguugugaugaugauuauu

SEQ ID NO: 8198 - RNA, 22 nt, Unknown
  Description of Unknown: Target viral genome RNA sequence
uaccaacaaugugugauaucag

SEQ ID NO: 8199 - RNA, 22 nt, Unknown
  Description of Unknown: Target viral genome RNA sequence
accaacaaugugugauaucaga

SEQ ID NO: 8200 - RNA, 22 nt, Unknown
  Description of Unknown: Target viral genome RNA sequence
auaaucuaccaacaauguguga

SEQ ID NO: 8201 - RNA, 22 nt, Unknown
  Description of Unknown: Target viral genome RNA sequence
uaaucuaccaacaaugugugau

SEQ ID NO: 8202 - RNA, 22 nt, Unknown
  Description of Unknown: Target viral genome RNA sequence
uuauaaucuaccaacaaugugu

SEQ ID NO: 8203 - RNA, 22 nt, Unknown
  Description of Unknown: Target viral genome RNA sequence
uauaaucuaccaacaaugugug

SEQ ID NO: 8204 - RNA, 22 nt, Unknown
  Description of Unknown: Target viral genome RNA sequence
ucuaccaacaaugugugauauc

SEQ ID NO: 8205 - RNA, 22 nt, Unknown
  Description of Unknown: Target viral genome RNA sequence
cuaccaacaaugugugauauca

SEQ ID NO: 8206 - RNA, 22 nt, Unknown
  Description of Unknown: Target viral genome RNA sequence
aaucuaccaacaaugugugaua

SEQ ID NO: 8207 - RNA, 22 nt, Unknown
  Description of Unknown: Target viral genome RNA sequence
aucuaccaacaaugugugauau

SEQ ID NO: 8208 - RNA, 22 nt, Unknown
  Description of Unknown: Target viral genome RNA sequence
uagagcucgcaccguagcuggu

SEQ ID NO: 8209 - RNA, 22 nt, Unknown
  Description of Unknown: Target viral genome RNA sequence
agagcucgcaccguagcuggug

SEQ ID NO: 8210 - RNA, 22 nt, Unknown
  Description of Unknown: Target viral genome RNA sequence
aauagagcucgcaccguagcug

SEQ ID NO: 8211 - RNA, 22 nt, Unknown
  Description of Unknown: Target viral genome RNA sequence
auagagcucgcaccguagcugg

SEQ ID NO: 8212 - RNA, 22 nt, Unknown
  Description of Unknown: Target viral genome RNA sequence
agaauagagcucgcaccguagc

SEQ ID NO: 8213 - RNA, 22 nt, Unknown
  Description of Unknown: Target viral genome RNA sequence
gaauagagcucgcaccguagcu

SEQ ID NO: 8214 - RNA, 22 nt, Unknown
  Description of Unknown: Target viral genome RNA sequence
aaagaauagagcucgcaccgua

SEQ ID NO: 8215 - RNA, 22 nt, Unknown
  Description of Unknown: Target viral genome RNA sequence
aagaauagagcucgcaccguag

SEQ ID NO: 8216 - RNA, 22 nt, Unknown
  Description of Unknown: Target viral genome RNA sequence
gagcucgcaccguagcuggugu

SEQ ID NO: 8217 - RNA, 22 nt, Unknown
  Description of Unknown: Target viral genome RNA sequence
agcucgcaccguagcugguguc

SEQ ID NO: 8218 - RNA, 22 nt, Unknown
  Description of Unknown: Target viral genome RNA sequence
uaacagaugcgcaaacagguuc

SEQ ID NO: 8219 - RNA, 22 nt, Unknown
  Description of Unknown: Target viral genome RNA sequence
aacagaugcgcaaacagguuca

SEQ ID NO: 8220 - RNA, 22 nt, Unknown
  Description of Unknown: Target viral genome RNA sequence
cauaacagaugcgcaaacaggu

SEQ ID NO: 8221 - RNA, 22 nt, Unknown
  Description of Unknown: Target viral genome RNA sequence
agaugcgcaaacagguucaucu

SEQ ID NO: 8222 - RNA, 22 nt, Unknown
  Description of Unknown: Target viral genome RNA sequence
gaugcgcaaacagguucaucua

SEQ ID NO: 8223 - RNA, 22 nt, Unknown
  Description of Unknown: Target viral genome RNA sequence
acagaugcgcaaacagguucau

SEQ ID NO: 8224 - RNA, 22 nt, Unknown
  Description of Unknown: Target viral genome RNA sequence
cagaugcgcaaacagguucauc

SEQ ID NO: 8225 - RNA, 22 nt, Unknown
  Description of Unknown: Target viral genome RNA sequence
aaacuauagguccagacauguu

SEQ ID NO: 8226 - RNA, 22 nt, Unknown
  Description of Unknown: Target viral genome RNA sequence
uucaguguguagacuuaugaaa

SEQ ID NO: 8227 - RNA, 22 nt, Unknown
  Description of Unknown: Target viral genome RNA sequence
auucaguguguagacuuaugaa

SEQ ID NO: 8228 - RNA, 22 nt, Unknown
  Description of Unknown: Target viral genome RNA sequence
guguucccaccuacaaguuuug

SEQ ID NO: 8229 - RNA, 22 nt, Unknown
  Description of Unknown: Target viral genome RNA sequence
uucccaccuacaaguuuuggac

SEQ ID NO: 8230 - RNA, 22 nt, Unknown
  Description of Unknown: Target viral genome RNA sequence
guucccaccuacaaguuuugga

SEQ ID NO: 8231 - RNA, 22 nt, Unknown
  Description of Unknown: Target viral genome RNA sequence
uuacuauuaagaaaccuaauga

SEQ ID NO: 8232 - RNA, 22 nt, Unknown
  Description of Unknown: Target viral genome RNA sequence
auugugugcguacugcugcaau

SEQ ID NO: 8233 - RNA, 22 nt, Unknown
  Description of Unknown: Target viral genome RNA sequence
gccuauuaauguuauaguuuuu

SEQ ID NO: 8234 - RNA, 22 nt, Unknown
  Description of Unknown: Target viral genome RNA sequence
ccuauuaauguuauaguuuuug

SEQ ID NO: 8235 - RNA, 22 nt, Unknown
  Description of Unknown: Target viral genome RNA sequence
cuauuaauguuauaguuuuuga

SEQ ID NO: 8236 - RNA, 22 nt, Unknown
  Description of Unknown: Target viral genome RNA sequence
uauuaauguuauaguuuuugau

SEQ ID NO: 8237 - RNA, 22 nt, Unknown
  Description of Unknown: Target viral genome RNA sequence
ugccuauuaauguuauaguuuu

SEQ ID NO: 8238 - RNA, 22 nt, Unknown
  Description of Unknown: Target viral genome RNA sequence
auuaauguuauaguuuuugaug

SEQ ID NO: 8239 - RNA, 22 nt, Unknown
  Description of Unknown: Target viral genome RNA sequence
uuaauguuauaguuuuugaugg

SEQ ID NO: 8240 - RNA, 22 nt, Unknown
  Description of Unknown: Target viral genome RNA sequence
cgucugcgguauguggaaaggu

SEQ ID NO: 8241 - RNA, 22 nt, Unknown
  Description of Unknown: Target viral genome RNA sequence
ucugcgguauguggaaagguua

SEQ ID NO: 8242 - RNA, 22 nt, Unknown
  Description of Unknown: Target viral genome RNA sequence
guaaacauuucucaaugaugau

SEQ ID NO: 8243 - RNA, 22 nt, Unknown
  Description of Unknown: Target viral genome RNA sequence
gcguaaacauuucucaaugaug

SEQ ID NO: 8244 - RNA, 22 nt, Unknown
  Description of Unknown: Target viral genome RNA sequence
cguaaacauuucucaaugauga

SEQ ID NO: 8245 - RNA, 22 nt, Unknown
  Description of Unknown: Target viral genome RNA sequence
uacauuuuggugcugguucuga

SEQ ID NO: 8246 - RNA, 22 nt, Unknown
  Description of Unknown: Target viral genome RNA sequence
guuauacauuuuggugcugguu

SEQ ID NO: 8247 - RNA, 22 nt, Unknown
  Description of Unknown: Target viral genome RNA sequence
aaauucaacuccaggcagcagu

SEQ ID NO: 8248 - RNA, 22 nt, Unknown
  Description of Unknown: Target viral genome RNA sequence
aauucaacuccaggcagcagua

SEQ ID NO: 8249 - RNA, 22 nt, Unknown
  Description of Unknown: Target viral genome RNA sequence
agaaauucaacuccaggcagca

SEQ ID NO: 8250 - RNA, 22 nt, Unknown
  Description of Unknown: Target viral genome RNA sequence
gaaauucaacuccaggcagcag

SEQ ID NO: 8251 - RNA, 22 nt, Unknown
  Description of Unknown: Target viral genome RNA sequence
ucaacuccaggcagcaguaggg

SEQ ID NO: 8252 - RNA, 22 nt, Unknown
  Description of Unknown: Target viral genome RNA sequence
caacuccaggcagcaguagggg

SEQ ID NO: 8253 - RNA, 22 nt, Unknown
  Description of Unknown: Target viral genome RNA sequence
ucgaucucuuguagaucuguuc

SEQ ID NO: 8254 - RNA, 22 nt, Unknown
  Description of Unknown: Target viral genome RNA sequence
cgaucucuuguagaucuguucu

SEQ ID NO: 8255 - RNA, 22 nt, Unknown
  Description of Unknown: Target viral genome RNA sequence
gaucucuuguagaucuguucuc

SEQ ID NO: 8256 - RNA, 22 nt, Unknown
  Description of Unknown: Target viral genome RNA sequence
aucucuuguagaucuguucucu

SEQ ID NO: 8257 - RNA, 22 nt, Unknown
  Description of Unknown: Target viral genome RNA sequence
ucucuuguagaucuguucucua

SEQ ID NO: 8258 - RNA, 22 nt, Unknown
  Description of Unknown: Target viral genome RNA sequence
cucuuguagaucuguucucuaa

SEQ ID NO: 8259 - RNA, 22 nt, Unknown
  Description of Unknown: Target viral genome RNA sequence
ucuuguagaucuguucucuaaa

SEQ ID NO: 8260 - RNA, 22 nt, Unknown
  Description of Unknown: Target viral genome RNA sequence
cuuguagaucuguucucuaaac

SEQ ID NO: 8261 - RNA, 22 nt, Unknown
  Description of Unknown: Target viral genome RNA sequence
uuguagaucuguucucuaaacg

SEQ ID NO: 8262 - RNA, 22 nt, Unknown
  Description of Unknown: Target viral genome RNA sequence
uguagaucuguucucuaaacga

SEQ ID NO: 8263 - RNA, 22 nt, Unknown
  Description of Unknown: Target viral genome RNA sequence
caaauaggcgugguaagagaau

SEQ ID NO: 8264 - RNA, 22 nt, Unknown
  Description of Unknown: Target viral genome RNA sequence
aaauaggcgugguaagagaauu

SEQ ID NO: 8265 - RNA, 22 nt, Unknown
  Description of Unknown: Target viral genome RNA sequence
auugcugauuauaauuauaaau

SEQ ID NO: 8266 - RNA, 22 nt, Unknown
  Description of Unknown: Target viral genome RNA sequence
gauugcugauuauaauuauaaa

SEQ ID NO: 8267 - RNA, 22 nt, Unknown
  Description of Unknown: Target viral genome RNA sequence
uuucugcucaaacuggaauugc

SEQ ID NO: 8268 - RNA, 22 nt, Unknown
  Description of Unknown: Target viral genome RNA sequence
uucugcucaaacuggaauugcc

SEQ ID NO: 8269 - RNA, 22 nt, Unknown
  Description of Unknown: Target viral genome RNA sequence
gaccucuuucugcucaaacugg

SEQ ID NO: 8270 - RNA, 22 nt, Unknown
  Description of Unknown: Target viral genome RNA sequence
accucuuucugcucaaacugga

SEQ ID NO: 8271 - RNA, 22 nt, Unknown
  Description of Unknown: Target viral genome RNA sequence
ggaccucuuucugcucaaacug

SEQ ID NO: 8272 - RNA, 22 nt, Unknown
  Description of Unknown: Target viral genome RNA sequence
ucuuucugcucaaacuggaauu

SEQ ID NO: 8273 - RNA, 22 nt, Unknown
  Description of Unknown: Target viral genome RNA sequence
cuuucugcucaaacuggaauug

SEQ ID NO: 8274 - RNA, 22 nt, Unknown
  Description of Unknown: Target viral genome RNA sequence
ccucuuucugcucaaacuggaa

SEQ ID NO: 8275 - RNA, 22 nt, Unknown
  Description of Unknown: Target viral genome RNA sequence
cucuuucugcucaaacuggaau

SEQ ID NO: 8276 - RNA, 22 nt, Unknown
  Description of Unknown: Target viral genome RNA sequence
uuacaccgugcggcacaggcac

SEQ ID NO: 8277 - RNA, 22 nt, Unknown
  Description of Unknown: Target viral genome RNA sequence
cuuacaccgugcggcacaggca

SEQ ID NO: 8278 - RNA, 22 nt, Unknown
  Description of Unknown: Target viral genome RNA sequence
cgucuuacaccgugcggcacag

SEQ ID NO: 8279 - RNA, 22 nt, Unknown
  Description of Unknown: Target viral genome RNA sequence
ccgucuuacaccgugcggcaca

SEQ ID NO: 8280 - RNA, 22 nt, Unknown
  Description of Unknown: Target viral genome RNA sequence
ucuuacaccgugcggcacaggc

SEQ ID NO: 8281 - RNA, 22 nt, Unknown
  Description of Unknown: Target viral genome RNA sequence
gucuuacaccgugcggcacagg

SEQ ID NO: 8282 - RNA, 22 nt, Unknown
  Description of Unknown: Target viral genome RNA sequence
agcccgucuuacaccgugcggc

SEQ ID NO: 8283 - RNA, 22 nt, Unknown
  Description of Unknown: Target viral genome RNA sequence
cagcccgucuuacaccgugcgg

SEQ ID NO: 8284 - RNA, 22 nt, Unknown
  Description of Unknown: Target viral genome RNA sequence
cccgucuuacaccgugcggcac

SEQ ID NO: 8285 - RNA, 22 nt, Unknown
  Description of Unknown: Target viral genome RNA sequence
gcccgucuuacaccgugcggca

SEQ ID NO: 8286 - RNA, 22 nt, Unknown
  Description of Unknown: Target viral genome RNA sequence
guuaauguagcauuugagcuuu

SEQ ID NO: 8287 - RNA, 22 nt, Unknown
  Description of Unknown: Target viral genome RNA sequence
uuaauguagcauuugagcuuug

SEQ ID NO: 8288 - RNA, 22 nt, Unknown
  Description of Unknown: Target viral genome RNA sequence
cuguuaauguagcauuugagcu

SEQ ID NO: 8289 - RNA, 22 nt, Unknown
  Description of Unknown: Target viral genome RNA sequence
uguuaauguagcauuugagcuu

SEQ ID NO: 8290 - RNA, 22 nt, Unknown
  Description of Unknown: Target viral genome RNA sequence
ccuguuaauguagcauuugagc

SEQ ID NO: 8291 - RNA, 22 nt, Unknown
  Description of Unknown: Target viral genome RNA sequence
augaguuuucuagcaauguugc

SEQ ID NO: 8292 - RNA, 22 nt, Unknown
  Description of Unknown: Target viral genome RNA sequence
ugaguuuucuagcaauguugca

SEQ ID NO: 8293 - RNA, 22 nt, Unknown
  Description of Unknown: Target viral genome RNA sequence
agaugaguuuucuagcaauguu

SEQ ID NO: 8294 - RNA, 22 nt, Unknown
  Description of Unknown: Target viral genome RNA sequence
gaugaguuuucuagcaauguug

SEQ ID NO: 8295 - RNA, 22 nt, Unknown
  Description of Unknown: Target viral genome RNA sequence
ucagaugaguuuucuagcaaug

SEQ ID NO: 8296 - RNA, 22 nt, Unknown
  Description of Unknown: Target viral genome RNA sequence
cagaugaguuuucuagcaaugu

SEQ ID NO: 8297 - RNA, 22 nt, Unknown
  Description of Unknown: Target viral genome RNA sequence
ucucagaugaguuuucuagcaa

SEQ ID NO: 8298 - RNA, 22 nt, Unknown
  Description of Unknown: Target viral genome RNA sequence
cucagaugaguuuucuagcaau

SEQ ID NO: 8299 - RNA, 22 nt, Unknown
  Description of Unknown: Target viral genome RNA sequence
uaucucagaugaguuuucuagc

SEQ ID NO: 8300 - RNA, 22 nt, Unknown
  Description of Unknown: Target viral genome RNA sequence
aucucagaugaguuuucuagca

SEQ ID NO: 8301 - RNA, 22 nt, Unknown
  Description of Unknown: Target viral genome RNA sequence
gcuauagaugcuuacccacuua

SEQ ID NO: 8302 - RNA, 22 nt, Unknown
  Description of Unknown: Target viral genome RNA sequence
cuauagaugcuuacccacuuac

SEQ ID NO: 8303 - RNA, 22 nt, Unknown
  Description of Unknown: Target viral genome RNA sequence
ggguaaggcuagacuuuauuau

SEQ ID NO: 8304 - RNA, 22 nt, Unknown
  Description of Unknown: Target viral genome RNA sequence
gguaaggcuagacuuuauuaug

SEQ ID NO: 8305 - RNA, 22 nt, Unknown
  Description of Unknown: Target viral genome RNA sequence
ugggguaaggcuagacuuuauu

SEQ ID NO: 8306 - RNA, 22 nt, Unknown
  Description of Unknown: Target viral genome RNA sequence
gggguaaggcuagacuuuauua

SEQ ID NO: 8307 - RNA, 22 nt, Unknown
  Description of Unknown: Target viral genome RNA sequence
aaugggguaaggcuagacuuua

SEQ ID NO: 8308 - RNA, 22 nt, Unknown
  Description of Unknown: Target viral genome RNA sequence
augggguaaggcuagacuuuau

SEQ ID NO: 8309 - RNA, 22 nt, Unknown
  Description of Unknown: Target viral genome RNA sequence
uaaaugggguaaggcuagacuu

SEQ ID NO: 8310 - RNA, 22 nt, Unknown
  Description of Unknown: Target viral genome RNA sequence
aaaugggguaaggcuagacuuu

SEQ ID NO: 8311 - RNA, 22 nt, Unknown
  Description of Unknown: Target viral genome RNA sequence
guaaggcuagacuuuauuauga

SEQ ID NO: 8312 - RNA, 22 nt, Unknown
  Description of Unknown: Target viral genome RNA sequence
uaaaggaguugcaccagguaca

SEQ ID NO: 8313 - RNA, 22 nt, Unknown
  Description of Unknown: Target viral genome RNA sequence
aaaggaguugcaccagguacag

SEQ ID NO: 8314 - RNA, 22 nt, Unknown
  Description of Unknown: Target viral genome RNA sequence
gauaaaggaguugcaccaggua

SEQ ID NO: 8315 - RNA, 22 nt, Unknown
  Description of Unknown: Target viral genome RNA sequence
auaaaggaguugcaccagguac

SEQ ID NO: 8316 - RNA, 22 nt, Unknown
  Description of Unknown: Target viral genome RNA sequence
cugauaaaggaguugcaccagg

SEQ ID NO: 8317 - RNA, 22 nt, Unknown
  Description of Unknown: Target viral genome RNA sequence
ugauaaaggaguugcaccaggu

SEQ ID NO: 8318 - RNA, 22 nt, Unknown
  Description of Unknown: Target viral genome RNA sequence
uucugauaaaggaguugcacca

SEQ ID NO: 8319 - RNA, 22 nt, Unknown
  Description of Unknown: Target viral genome RNA sequence
ucugauaaaggaguugcaccag

SEQ ID NO: 8320 - RNA, 22 nt, Unknown
  Description of Unknown: Target viral genome RNA sequence
aaggaguugcaccagguacagc

SEQ ID NO: 8321 - RNA, 22 nt, Unknown
  Description of Unknown: Target viral genome RNA sequence
ggccucacuuguucuugcucgc

SEQ ID NO: 8322 - RNA, 22 nt, Unknown
  Description of Unknown: Target viral genome RNA sequence
gccucacuuguucuugcucgca

SEQ ID NO: 8323 - RNA, 22 nt, Unknown
  Description of Unknown: Target viral genome RNA sequence
auggccucacuuguucuugcuc

SEQ ID NO: 8324 - RNA, 22 nt, Unknown
  Description of Unknown: Target viral genome RNA sequence
uggccucacuuguucuugcucg

SEQ ID NO: 8325 - RNA, 22 nt, Unknown
  Description of Unknown: Target viral genome RNA sequence
aacuuuugauucugaguacugu

SEQ ID NO: 8326 - RNA, 22 nt, Unknown
  Description of Unknown: Target viral genome RNA sequence
caacuuuugauucugaguacug

SEQ ID NO: 8327 - RNA, 22 nt, Unknown
  Description of Unknown: Target viral genome RNA sequence
uaacaacuuuugauucugagua

SEQ ID NO: 8328 - RNA, 22 nt, Unknown
  Description of Unknown: Target viral genome RNA sequence
guaacaacuuuugauucugagu

SEQ ID NO: 8329 - RNA, 22 nt, Unknown
  Description of Unknown: Target viral genome RNA sequence
acaacuuuugauucugaguacu

SEQ ID NO: 8330 - RNA, 22 nt, Unknown
  Description of Unknown: Target viral genome RNA sequence
aacaacuuuugauucugaguac

SEQ ID NO: 8331 - RNA, 22 nt, Unknown
  Description of Unknown: Target viral genome RNA sequence
ugagcaggcuguugcuaauggu

SEQ ID NO: 8332 - RNA, 22 nt, Unknown
  Description of Unknown: Target viral genome RNA sequence
augagcaggcuguugcuaaugg

SEQ ID NO: 8333 - RNA, 22 nt, Unknown
  Description of Unknown: Target viral genome RNA sequence
uaugagcaggcuguugcuaaug

SEQ ID NO: 8334 - RNA, 22 nt, Unknown
  Description of Unknown: Target viral genome RNA sequence
guuaugaggaucaagaugcacu

SEQ ID NO: 8335 - RNA, 22 nt, Unknown
  Description of Unknown: Target viral genome RNA sequence
uuaugaggaucaagaugcacuu

SEQ ID NO: 8336 - RNA, 22 nt, Unknown
  Description of Unknown: Target viral genome RNA sequence
gaguuaugaggaucaagaugca

SEQ ID NO: 8337 - RNA, 22 nt, Unknown
  Description of Unknown: Target viral genome RNA sequence
aguuaugaggaucaagaugcac

SEQ ID NO: 8338 - RNA, 22 nt, Unknown
  Description of Unknown: Target viral genome RNA sequence
augaguuaugaggaucaagaug

SEQ ID NO: 8339 - RNA, 22 nt, Unknown
  Description of Unknown: Target viral genome RNA sequence
ugaguuaugaggaucaagaugc

SEQ ID NO: 8340 - RNA, 22 nt, Unknown
  Description of Unknown: Target viral genome RNA sequence
caaugaguuaugaggaucaaga

SEQ ID NO: 8341 - RNA, 22 nt, Unknown
  Description of Unknown: Target viral genome RNA sequence
aaugaguuaugaggaucaagau

SEQ ID NO: 8342 - RNA, 22 nt, Unknown
  Description of Unknown: Target viral genome RNA sequence
uucaaugaguuaugaggaucaa

SEQ ID NO: 8343 - RNA, 22 nt, Unknown
  Description of Unknown: Target viral genome RNA sequence
ucaaugaguuaugaggaucaag

SEQ ID NO: 8344 - RNA, 22 nt, Unknown
  Description of Unknown: Target viral genome RNA sequence
cuugguucaccgcucucacuca

SEQ ID NO: 8345 - RNA, 22 nt, Unknown
  Description of Unknown: Target viral genome RNA sequence
ucuugguucaccgcucucacuc

SEQ ID NO: 8346 - RNA, 22 nt, Unknown
  Description of Unknown: Target viral genome RNA sequence
gucuugguucaccgcucucacu

SEQ ID NO: 8347 - RNA, 22 nt, Unknown
  Description of Unknown: Target viral genome RNA sequence
cgucuugguucaccgcucucac

SEQ ID NO: 8348 - RNA, 22 nt, Unknown
  Description of Unknown: Target viral genome RNA sequence
gaugcacucaacaacauuauca

SEQ ID NO: 8349 - RNA, 22 nt, Unknown
  Description of Unknown: Target viral genome RNA sequence
augcacucaacaacauuaucaa

SEQ ID NO: 8350 - RNA, 22 nt, Unknown
  Description of Unknown: Target viral genome RNA sequence
augaugcacucaacaacauuau

SEQ ID NO: 8351 - RNA, 22 nt, Unknown
  Description of Unknown: Target viral genome RNA sequence
ugaugcacucaacaacauuauc

SEQ ID NO: 8352 - RNA, 22 nt, Unknown
  Description of Unknown: Target viral genome RNA sequence
uaaugaugcacucaacaacauu

SEQ ID NO: 8353 - RNA, 22 nt, Unknown
  Description of Unknown: Target viral genome RNA sequence
aaugaugcacucaacaacauua

SEQ ID NO: 8354 - RNA, 22 nt, Unknown
  Description of Unknown: Target viral genome RNA sequence
gauaaugaugcacucaacaaca

SEQ ID NO: 8355 - RNA, 22 nt, Unknown
  Description of Unknown: Target viral genome RNA sequence
auaaugaugcacucaacaacau

SEQ ID NO: 8356 - RNA, 22 nt, Unknown
  Description of Unknown: Target viral genome RNA sequence
ugcacucaacaacauuaucaac

SEQ ID NO: 8357 - RNA, 22 nt, Unknown
  Description of Unknown: Target viral genome RNA sequence
gcacucaacaacauuaucaaca

SEQ ID NO: 8358 - RNA, 22 nt, Unknown
  Description of Unknown: Target viral genome RNA sequence
gcauuggcauggaagucacacc

SEQ ID NO: 8359 - RNA, 22 nt, Unknown
  Description of Unknown: Target viral genome RNA sequence
cauuggcauggaagucacaccu

SEQ ID NO: 8360 - RNA, 22 nt, Unknown
  Description of Unknown: Target viral genome RNA sequence
gcgcauuggcauggaagucaca

SEQ ID NO: 8361 - RNA, 22 nt, Unknown
  Description of Unknown: Target viral genome RNA sequence
cgcauuggcauggaagucacac

SEQ ID NO: 8362 - RNA, 22 nt, Unknown
  Description of Unknown: Target viral genome RNA sequence
uggcauggaagucacaccuucg

SEQ ID NO: 8363 - RNA, 22 nt, Unknown
  Description of Unknown: Target viral genome RNA sequence
ggcauggaagucacaccuucgg

SEQ ID NO: 8364 - RNA, 22 nt, Unknown
  Description of Unknown: Target viral genome RNA sequence
auuggcauggaagucacaccuu

SEQ ID NO: 8365 - RNA, 22 nt, Unknown
  Description of Unknown: Target viral genome RNA sequence
uuggcauggaagucacaccuuc

SEQ ID NO: 8366 - RNA, 22 nt, Unknown
  Description of Unknown: Target viral genome RNA sequence
gcauggaagucacaccuucggg

SEQ ID NO: 8367 - RNA, 22 nt, Unknown
  Description of Unknown: Target viral genome RNA sequence
cauggaagucacaccuucggga

SEQ ID NO: 8368 - RNA, 22 nt, Unknown
  Description of Unknown: Target viral genome RNA sequence
ggagcagaggcggcagucaagc

SEQ ID NO: 8369 - RNA, 22 nt, Unknown
  Description of Unknown: Target viral genome RNA sequence
aacccaaggaaauuuuggggac

SEQ ID NO: 8370 - RNA, 22 nt, Unknown
  Description of Unknown: Target viral genome RNA sequence
gacaauauugcuuugcuuguac

SEQ ID NO: 8371 - RNA, 22 nt, Unknown
  Description of Unknown: Target viral genome RNA sequence
uuaacaacuaaacgaacaaugu

SEQ ID NO: 8372 - RNA, 22 nt, Unknown
  Description of Unknown: Target viral genome RNA sequence
guuaacaacuaaacgaacaaug

SEQ ID NO: 8373 - RNA, 22 nt, Unknown
  Description of Unknown: Target viral genome RNA sequence
uguuaacaacuaaacgaacaau

SEQ ID NO: 8374 - RNA, 22 nt, Unknown
  Description of Unknown: Target viral genome RNA sequence
uuguuaacaacuaaacgaacaa

SEQ ID NO: 8375 - RNA, 22 nt, Unknown
  Description of Unknown: Target viral genome RNA sequence
cuuguuaacaacuaaacgaaca

SEQ ID NO: 8376 - RNA, 22 nt, Unknown
  Description of Unknown: Target viral genome RNA sequence
ucuuguuaacaacuaaacgaac

SEQ ID NO: 8377 - RNA, 22 nt, Unknown
  Description of Unknown: Target viral genome RNA sequence
uucuuguuaacaacuaaacgaa

SEQ ID NO: 8378 - RNA, 22 nt, Unknown
  Description of Unknown: Target viral genome RNA sequence
guucuuguuaacaacuaaacga

SEQ ID NO: 8379 - RNA, 22 nt, Unknown
  Description of Unknown: Target viral genome RNA sequence
uguucuuguuaacaacuaaacg

SEQ ID NO: 8380 - RNA, 22 nt, Unknown
  Description of Unknown: Target viral genome RNA sequence
auguucuuguuaacaacuaaac

SEQ ID NO: 8381 - RNA, 22 nt, Unknown
  Description of Unknown: Target viral genome RNA sequence
uaaacacgcuuguuaaacaacu

SEQ ID NO: 8382 - RNA, 22 nt, Unknown
  Description of Unknown: Target viral genome RNA sequence
uuaaacacgcuuguuaaacaac

SEQ ID NO: 8383 - RNA, 22 nt, Unknown
  Description of Unknown: Target viral genome RNA sequence
aacacgcuuguuaaacaacuua

SEQ ID NO: 8384 - RNA, 22 nt, Unknown
  Description of Unknown: Target viral genome RNA sequence
aaacacgcuuguuaaacaacuu

SEQ ID NO: 8385 - RNA, 22 nt, Unknown
  Description of Unknown: Target viral genome RNA sequence
acgcuuguuaaacaacuuagcu

SEQ ID NO: 8386 - RNA, 22 nt, Unknown
  Description of Unknown: Target viral genome RNA sequence
aaggccaaacugucacuaagaa

SEQ ID NO: 8387 - RNA, 22 nt, Unknown
  Description of Unknown: Target viral genome RNA sequence
caaggccaaacugucacuaaga

SEQ ID NO: 8388 - RNA, 22 nt, Unknown
  Description of Unknown: Target viral genome RNA sequence
acaaggccaaacugucacuaag

SEQ ID NO: 8389 - RNA, 22 nt, Unknown
  Description of Unknown: Target viral genome RNA sequence
aacaaggccaaacugucacuaa

SEQ ID NO: 8390 - RNA, 22 nt, Unknown
  Description of Unknown: Target viral genome RNA sequence
ccaaacugucacuaagaaaucu

SEQ ID NO: 8391 - RNA, 22 nt, Unknown
  Description of Unknown: Target viral genome RNA sequence
gccaaacugucacuaagaaauc

SEQ ID NO: 8392 - RNA, 22 nt, Unknown
  Description of Unknown: Target viral genome RNA sequence
ggccaaacugucacuaagaaau

SEQ ID NO: 8393 - RNA, 22 nt, Unknown
  Description of Unknown: Target viral genome RNA sequence
aggccaaacugucacuaagaaa

SEQ ID NO: 8394 - RNA, 22 nt, Unknown
  Description of Unknown: Target viral genome RNA sequence
caaacugucacuaagaaaucug

SEQ ID NO: 8395 - RNA, 22 nt, Unknown
  Description of Unknown: Target viral genome RNA sequence
gguuuacccaauaauacugcgu

SEQ ID NO: 8396 - RNA, 22 nt, Unknown
  Description of Unknown: Target viral genome RNA sequence
agguuuacccaauaauacugcg

SEQ ID NO: 8397 - RNA, 22 nt, Unknown
  Description of Unknown: Target viral genome RNA sequence
uuuacccaauaauacugcgucu

SEQ ID NO: 8398 - RNA, 22 nt, Unknown
  Description of Unknown: Target viral genome RNA sequence
guuuacccaauaauacugcguc

SEQ ID NO: 8399 - RNA, 22 nt, Unknown
  Description of Unknown: Target viral genome RNA sequence
uuacccaauaauacugcgucuu

SEQ ID NO: 8400 - RNA, 22 nt, Unknown
  Description of Unknown: Target viral genome RNA sequence
cccaauaauacugcgucuuggu

SEQ ID NO: 8401 - RNA, 22 nt, Unknown
  Description of Unknown: Target viral genome RNA sequence
acagaacuggaaccaccuugua

SEQ ID NO: 8402 - RNA, 22 nt, Unknown
  Description of Unknown: Target viral genome RNA sequence
uacagaacuggaaccaccuugu

SEQ ID NO: 8403 - RNA, 22 nt, Unknown
  Description of Unknown: Target viral genome RNA sequence
auacagaacuggaaccaccuug

SEQ ID NO: 8404 - RNA, 22 nt, Unknown
  Description of Unknown: Target viral genome RNA sequence
uauacagaacuggaaccaccuu

SEQ ID NO: 8405 - RNA, 22 nt, Unknown
  Description of Unknown: Target viral genome RNA sequence
cgaugguggcuguauuaaugcu

SEQ ID NO: 8406 - RNA, 22 nt, Unknown
  Description of Unknown: Target viral genome RNA sequence
gaugguggcuguauuaaugcua

SEQ ID NO: 8407 - RNA, 22 nt, Unknown
  Description of Unknown: Target viral genome RNA sequence
uacgaugguggcuguauuaaug

SEQ ID NO: 8408 - RNA, 22 nt, Unknown
  Description of Unknown: Target viral genome RNA sequence
acgaugguggcuguauuaaugc

SEQ ID NO: 8409 - RNA, 22 nt, Unknown
  Description of Unknown: Target viral genome RNA sequence
guuacgaugguggcuguauuaa

SEQ ID NO: 8410 - RNA, 22 nt, Unknown
  Description of Unknown: Target viral genome RNA sequence
uuacgaugguggcuguauuaau

SEQ ID NO: 8411 - RNA, 22 nt, Unknown
  Description of Unknown: Target viral genome RNA sequence
uuguuacgaugguggcuguauu

SEQ ID NO: 8412 - RNA, 22 nt, Unknown
  Description of Unknown: Target viral genome RNA sequence
uguuacgaugguggcuguauua

SEQ ID NO: 8413 - RNA, 22 nt, Unknown
  Description of Unknown: Target viral genome RNA sequence
gauuguuacgaugguggcugua

SEQ ID NO: 8414 - RNA, 22 nt, Unknown
  Description of Unknown: Target viral genome RNA sequence
auuguuacgaugguggcuguau

SEQ ID NO: 8415 - RNA, 22 nt, Unknown
  Description of Unknown: Target viral genome RNA sequence
gcugguggcacuacugaaaugc

SEQ ID NO: 8416 - RNA, 22 nt, Unknown
  Description of Unknown: Target viral genome RNA sequence
ggcugguggcacuacugaaaug

SEQ ID NO: 8417 - RNA, 22 nt, Unknown
  Description of Unknown: Target viral genome RNA sequence
aggcugguggcacuacugaaau

SEQ ID NO: 8418 - RNA, 22 nt, Unknown
  Description of Unknown: Target viral genome RNA sequence
aaggcugguggcacuacugaaa

SEQ ID NO: 8419 - RNA, 22 nt, Unknown
  Description of Unknown: Target viral genome RNA sequence
aaaggcugguggcacuacugaa

SEQ ID NO: 8420 - RNA, 22 nt, Unknown
  Description of Unknown: Target viral genome RNA sequence
uuacccagauccaucaagaauc

SEQ ID NO: 8421 - RNA, 22 nt, Unknown
  Description of Unknown: Target viral genome RNA sequence
cuuacccagauccaucaagaau

SEQ ID NO: 8422 - RNA, 22 nt, Unknown
  Description of Unknown: Target viral genome RNA sequence
uuccuuacccagauccaucaag

SEQ ID NO: 8423 - RNA, 22 nt, Unknown
  Description of Unknown: Target viral genome RNA sequence
cuuccuuacccagauccaucaa

SEQ ID NO: 8424 - RNA, 22 nt, Unknown
  Description of Unknown: Target viral genome RNA sequence
ccuuacccagauccaucaagaa

SEQ ID NO: 8425 - RNA, 22 nt, Unknown
  Description of Unknown: Target viral genome RNA sequence
uccuuacccagauccaucaaga

SEQ ID NO: 8426 - RNA, 22 nt, Unknown
  Description of Unknown: Target viral genome RNA sequence
cuuauggauuuguuuaugagaa

SEQ ID NO: 8427 - RNA, 22 nt, Unknown
  Description of Unknown: Target viral genome RNA sequence
aacgaacuuauggauuuguuua

SEQ ID NO: 8428 - RNA, 22 nt, Unknown
  Description of Unknown: Target viral genome RNA sequence
aaacgaacuuauggauuuguuu

SEQ ID NO: 8429 - RNA, 22 nt, Unknown
  Description of Unknown: Target viral genome RNA sequence
uaaacgaacuuauggauuuguu

SEQ ID NO: 8430 - RNA, 22 nt, Unknown
  Description of Unknown: Target viral genome RNA sequence
auaaacgaacuuauggauuugu

SEQ ID NO: 8431 - RNA, 22 nt, Unknown
  Description of Unknown: Target viral genome RNA sequence
aacuuauggauuuguuuaugag

SEQ ID NO: 8432 - RNA, 22 nt, Unknown
  Description of Unknown: Target viral genome RNA sequence
gaacuuauggauuuguuuauga

SEQ ID NO: 8433 - RNA, 22 nt, Unknown
  Description of Unknown: Target viral genome RNA sequence
cgaacuuauggauuuguuuaug

SEQ ID NO: 8434 - RNA, 22 nt, Unknown
  Description of Unknown: Target viral genome RNA sequence
acgaacuuauggauuuguuuau

SEQ ID NO: 8435 - RNA, 22 nt, Unknown
  Description of Unknown: Target viral genome RNA sequence
ucagagcuucugcuaaucuugc

SEQ ID NO: 8436 - RNA, 22 nt, Unknown
  Description of Unknown: Target viral genome RNA sequence
cagagcuucugcuaaucuugcu

SEQ ID NO: 8437 - RNA, 22 nt, Unknown
  Description of Unknown: Target viral genome RNA sequence
agagcuucugcuaaucuugcug

SEQ ID NO: 8438 - RNA, 22 nt, Unknown
  Description of Unknown: Target viral genome RNA sequence
gagcuucugcuaaucuugcugc

SEQ ID NO: 8439 - RNA, 22 nt, Unknown
  Description of Unknown: Target viral genome RNA sequence
uuaugguaaugcuuuagaucaa

SEQ ID NO: 8440 - RNA, 22 nt, Unknown
  Description of Unknown: Target viral genome RNA sequence
auuaugguaaugcuuuagauca

SEQ ID NO: 8441 - RNA, 22 nt, Unknown
  Description of Unknown: Target viral genome RNA sequence
uauuaugguaaugcuuuagauc

SEQ ID NO: 8442 - RNA, 22 nt, Unknown
  Description of Unknown: Target viral genome RNA sequence
aacuauaaauuaaacacagacc

SEQ ID NO: 8443 - RNA, 22 nt, Unknown
  Description of Unknown: Target viral genome RNA sequence
agugaauucaacauuagaacag

SEQ ID NO: 8444 - RNA, 22 nt, Unknown
  Description of Unknown: Target viral genome RNA sequence
aagugaauucaacauuagaaca

SEQ ID NO: 8445 - RNA, 22 nt, Unknown
  Description of Unknown: Target viral genome RNA sequence
aaagugaauucaacauuagaac

SEQ ID NO: 8446 - RNA, 22 nt, Unknown
  Description of Unknown: Target viral genome RNA sequence
caaagugaauucaacauuagaa

SEQ ID NO: 8447 - RNA, 22 nt, Unknown
  Description of Unknown: Target viral genome RNA sequence
ucaaagugaauucaacauuaga

SEQ ID NO: 8448 - RNA, 22 nt, Unknown
  Description of Unknown: Target viral genome RNA sequence
uucaaagugaauucaacauuag

SEQ ID NO: 8449 - RNA, 22 nt, Unknown
  Description of Unknown: Target viral genome RNA sequence
aauucaaagugaauucaacauu

SEQ ID NO: 8450 - RNA, 22 nt, Unknown
  Description of Unknown: Target viral genome RNA sequence
ugaauucaacauuagaacagua

SEQ ID NO: 8451 - RNA, 22 nt, Unknown
  Description of Unknown: Target viral genome RNA sequence
gugaauucaacauuagaacagu

SEQ ID NO: 8452 - RNA, 22 nt, Unknown
  Description of Unknown: Target viral genome RNA sequence
aacauucccaccaacagagccu

SEQ ID NO: 8453 - RNA, 22 nt, Unknown
  Description of Unknown: Target viral genome RNA sequence
aaacauucccaccaacagagcc

SEQ ID NO: 8454 - RNA, 22 nt, Unknown
  Description of Unknown: Target viral genome RNA sequence
auuuuaacaaagacuucuauga

SEQ ID NO: 8455 - RNA, 22 nt, Unknown
  Description of Unknown: Target viral genome RNA sequence
aauuuuaacaaagacuucuaug

SEQ ID NO: 8456 - RNA, 22 nt, Unknown
  Description of Unknown: Target viral genome RNA sequence
ccgguaauuuuaacaaagacuu

SEQ ID NO: 8457 - RNA, 22 nt, Unknown
  Description of Unknown: Target viral genome RNA sequence
cccgguaauuuuaacaaagacu

SEQ ID NO: 8458 - RNA, 22 nt, Unknown
  Description of Unknown: Target viral genome RNA sequence
acccgguaauuuuaacaaagac

SEQ ID NO: 8459 - RNA, 22 nt, Unknown
  Description of Unknown: Target viral genome RNA sequence
aacccgguaauuuuaacaaaga

SEQ ID NO: 8460 - RNA, 22 nt, Unknown
  Description of Unknown: Target viral genome RNA sequence
cuaagggcacacuagaaccaga

SEQ ID NO: 8461 - RNA, 22 nt, Unknown
  Description of Unknown: Target viral genome RNA sequence
uuaggagguaugagcuauuauu

SEQ ID NO: 8462 - RNA, 22 nt, Unknown
  Description of Unknown: Target viral genome RNA sequence
uaggagguaugagcuauuauug

SEQ ID NO: 8463 - RNA, 22 nt, Unknown
  Description of Unknown: Target viral genome RNA sequence
aggagguaugagcuauuauugu

SEQ ID NO: 8464 - RNA, 22 nt, Unknown
  Description of Unknown: Target viral genome RNA sequence
ggagguaugagcuauuauugua

SEQ ID NO: 8465 - RNA, 22 nt, Unknown
  Description of Unknown: Target viral genome RNA sequence
gagguaugagcuauuauuguaa

SEQ ID NO: 8466 - RNA, 22 nt, Unknown
  Description of Unknown: Target viral genome RNA sequence
uaggcgacgagcuuggcacuga

SEQ ID NO: 8467 - RNA, 22 nt, Unknown
  Description of Unknown: Target viral genome RNA sequence
uuaggcgacgagcuuggcacug

SEQ ID NO: 8468 - RNA, 22 nt, Unknown
  Description of Unknown: Target viral genome RNA sequence
ggcgacgagcuuggcacugauc

SEQ ID NO: 8469 - RNA, 22 nt, Unknown
  Description of Unknown: Target viral genome RNA sequence
aggcgacgagcuuggcacugau

SEQ ID NO: 8470 - RNA, 22 nt, Unknown
  Description of Unknown: Target viral genome RNA sequence
gcgacgagcuuggcacugaucc

SEQ ID NO: 8471 - RNA, 22 nt, Unknown
  Description of Unknown: Target viral genome RNA sequence
guuuugcuuuccaugcagggug

SEQ ID NO: 8472 - RNA, 22 nt, Unknown
  Description of Unknown: Target viral genome RNA sequence
uuuugcuuuccaugcagggugc

SEQ ID NO: 8473 - RNA, 22 nt, Unknown
  Description of Unknown: Target viral genome RNA sequence
cuguuuugcuuuccaugcaggg

SEQ ID NO: 8474 - RNA, 22 nt, Unknown
  Description of Unknown: Target viral genome RNA sequence
uguuuugcuuuccaugcagggu

SEQ ID NO: 8475 - RNA, 22 nt, Unknown
  Description of Unknown: Target viral genome RNA sequence
ucuguuuugcuuuccaugcagg

SEQ ID NO: 8476 - RNA, 22 nt, Unknown
  Description of Unknown: Target viral genome RNA sequence
cguuuuuaaacggguuugcggu

SEQ ID NO: 8477 - RNA, 22 nt, Unknown
  Description of Unknown: Target viral genome RNA sequence
ucguuuuuaaacggguuugcgg

SEQ ID NO: 8478 - RNA, 22 nt, Unknown
  Description of Unknown: Target viral genome RNA sequence
uuuuuaaacggguuugcggugu

SEQ ID NO: 8479 - RNA, 22 nt, Unknown
  Description of Unknown: Target viral genome RNA sequence
guuuuuaaacggguuugcggug

SEQ ID NO: 8480 - RNA, 22 nt, Unknown
  Description of Unknown: Target viral genome RNA sequence
uuuaaacggguuugcgguguaa

SEQ ID NO: 8481 - RNA, 22 nt, Unknown
  Description of Unknown: Target viral genome RNA sequence
uuuuaaacggguuugcggugua

SEQ ID NO: 8482 - RNA, 22 nt, Unknown
  Description of Unknown: Target viral genome RNA sequence
uaaacggguuugcgguguaagu

SEQ ID NO: 8483 - RNA, 22 nt, Unknown
  Description of Unknown: Target viral genome RNA sequence
uuaaacggguuugcgguguaag

SEQ ID NO: 8484 - RNA, 22 nt, Unknown
  Description of Unknown: Target viral genome RNA sequence
aacggguuugcgguguaagugc

SEQ ID NO: 8485 - RNA, 22 nt, Unknown
  Description of Unknown: Target viral genome RNA sequence
aaacggguuugcgguguaagug

SEQ ID NO: 8486 - RNA, 22 nt, Unknown
  Description of Unknown: Target viral genome RNA sequence
gugaaauggucauguguggcgg

SEQ ID NO: 8487 - RNA, 22 nt, Unknown
  Description of Unknown: Target viral genome RNA sequence
auggucauguguggcgguucac

SEQ ID NO: 8488 - RNA, 22 nt, Unknown
  Description of Unknown: Target viral genome RNA sequence
ggucauguguggcgguucacua

SEQ ID NO: 8489 - RNA, 22 nt, Unknown
  Description of Unknown: Target viral genome RNA sequence
uggucauguguggcgguucacu

SEQ ID NO: 8490 - RNA, 22 nt, Unknown
  Description of Unknown: Target viral genome RNA sequence
ucauguguggcgguucacuaua

SEQ ID NO: 8491 - RNA, 22 nt, Unknown
  Description of Unknown: Target viral genome RNA sequence
gucauguguggcgguucacuau

SEQ ID NO: 8492 - RNA, 22 nt, Unknown
  Description of Unknown: Target viral genome RNA sequence
ccccgcauuacguuugguggac

SEQ ID NO: 8493 - RNA, 22 nt, Unknown
  Description of Unknown: Target viral genome RNA sequence
cccgcauuacguuugguggacc

SEQ ID NO: 8494 - RNA, 22 nt, Unknown
  Description of Unknown: Target viral genome RNA sequence
ccgcauuacguuugguggaccc

SEQ ID NO: 8495 - RNA, 22 nt, Unknown
  Description of Unknown: Target viral genome RNA sequence
uaccgcaagguucuucuucgua

SEQ ID NO: 8496 - RNA, 22 nt, Unknown
  Description of Unknown: Target viral genome RNA sequence
cuuacuaaaggaccucaugaau

SEQ ID NO: 8497 - RNA, 22 nt, Unknown
  Description of Unknown: Target viral genome RNA sequence
uuacuaaaggaccucaugaauu

SEQ ID NO: 8498 - RNA, 22 nt, Unknown
  Description of Unknown: Target viral genome RNA sequence
uucuuuuucuugcuuucguggu

SEQ ID NO: 8499 - RNA, 22 nt, Unknown
  Description of Unknown: Target viral genome RNA sequence
ucuuuuucuugcuuucguggua

SEQ ID NO: 8500 - RNA, 22 nt, Unknown
  Description of Unknown: Target viral genome RNA sequence
cuuuuucuugcuuucgugguau

SEQ ID NO: 8501 - RNA, 22 nt, Unknown
  Description of Unknown: Target viral genome RNA sequence
uuuuucuugcuuucgugguauu

SEQ ID NO: 8502 - RNA, 22 nt, Unknown
  Description of Unknown: Target viral genome RNA sequence
guacuucuuuuucuugcuuucg

SEQ ID NO: 8503 - RNA, 22 nt, Unknown
  Description of Unknown: Target viral genome RNA sequence
uacuucuuuuucuugcuuucgu

SEQ ID NO: 8504 - RNA, 22 nt, Unknown
  Description of Unknown: Target viral genome RNA sequence
acuucuuuuucuugcuuucgug

SEQ ID NO: 8505 - RNA, 22 nt, Unknown
  Description of Unknown: Target viral genome RNA sequence
cuucuuuuucuugcuuucgugg

SEQ ID NO: 8506 - RNA, 22 nt, Unknown
  Description of Unknown: Target viral genome RNA sequence
uuuucuugcuuucgugguauuc

SEQ ID NO: 8507 - RNA, 22 nt, Unknown
  Description of Unknown: Target viral genome RNA sequence
uuucuugcuuucgugguauucu

SEQ ID NO: 8508 - RNA, 22 nt, Unknown
  Description of Unknown: Target viral genome RNA sequence
cucaaggaacaacauugccaaa

SEQ ID NO: 8509 - RNA, 22 nt, Unknown
  Description of Unknown: Target viral genome RNA sequence
caacuuccucaaggaacaacau

SEQ ID NO: 8510 - RNA, 22 nt, Unknown
  Description of Unknown: Target viral genome RNA sequence
acaacuuccucaaggaacaaca

SEQ ID NO: 8511 - RNA, 22 nt, Unknown
  Description of Unknown: Target viral genome RNA sequence
acuuccucaaggaacaacauug

SEQ ID NO: 8512 - RNA, 22 nt, Unknown
  Description of Unknown: Target viral genome RNA sequence
aacuuccucaaggaacaacauu

SEQ ID NO: 8513 - RNA, 22 nt, Unknown
  Description of Unknown: Target viral genome RNA sequence
uuccucaaggaacaacauugcc

SEQ ID NO: 8514 - RNA, 22 nt, Unknown
  Description of Unknown: Target viral genome RNA sequence
cuuccucaaggaacaacauugc

SEQ ID NO: 8515 - RNA, 22 nt, Unknown
  Description of Unknown: Target viral genome RNA sequence
ccucaaggaacaacauugccaa

SEQ ID NO: 8516 - RNA, 22 nt, Unknown
  Description of Unknown: Target viral genome RNA sequence
uccucaaggaacaacauugcca

SEQ ID NO: 8517 - RNA, 22 nt, Unknown
  Description of Unknown: Target viral genome RNA sequence
cccaaggaaauuuuggggacca

SEQ ID NO: 8518 - RNA, 22 nt, Unknown
  Description of Unknown: Target viral genome RNA sequence
acccaaggaaauuuuggggacc

SEQ ID NO: 8519 - RNA, 22 nt, Unknown
  Description of Unknown: Target viral genome RNA sequence
uuguucaacuuagugaaauuag

SEQ ID NO: 8520 - RNA, 22 nt, Unknown
  Description of Unknown: Target viral genome RNA sequence
auuguucaacuuagugaaauua

SEQ ID NO: 8521 - RNA, 22 nt, Unknown
  Description of Unknown: Target viral genome RNA sequence
aauuguucaacuuagugaaauu

SEQ ID NO: 8522 - RNA, 22 nt, Unknown
  Description of Unknown: Target viral genome RNA sequence
aaauuguucaacuuagugaaau

SEQ ID NO: 8523 - RNA, 22 nt, Unknown
  Description of Unknown: Target viral genome RNA sequence
gaauguucucuaugagaaccaa

SEQ ID NO: 8524 - RNA, 22 nt, Unknown
  Description of Unknown: Target viral genome RNA sequence
aauguucucuaugagaaccaaa

SEQ ID NO: 8525 - RNA, 22 nt, Unknown
  Description of Unknown: Target viral genome RNA sequence
aauaagggacacuuugauggac

SEQ ID NO: 8526 - RNA, 22 nt, Unknown
  Description of Unknown: Target viral genome RNA sequence
aaauccuaaaggauuuugugac

SEQ ID NO: 8527 - RNA, 22 nt, Unknown
  Description of Unknown: Target viral genome RNA sequence
aauccuaaaggauuuugugacu

SEQ ID NO: 8528 - RNA, 22 nt, Unknown
  Description of Unknown: Target viral genome RNA sequence
gaucauccaaauccuaaaggau

SEQ ID NO: 8529 - RNA, 22 nt, Unknown
  Description of Unknown: Target viral genome RNA sequence
aucauccaaauccuaaaggauu

SEQ ID NO: 8530 - RNA, 22 nt, Unknown
  Description of Unknown: Target viral genome RNA sequence
cauccaaauccuaaaggauuuu

SEQ ID NO: 8531 - RNA, 22 nt, Unknown
  Description of Unknown: Target viral genome RNA sequence
auccaaauccuaaaggauuuug

SEQ ID NO: 8532 - RNA, 22 nt, Unknown
  Description of Unknown: Target viral genome RNA sequence
uccaaauccuaaaggauuuugu

SEQ ID NO: 8533 - RNA, 22 nt, Unknown
  Description of Unknown: Target viral genome RNA sequence
ccaaauccuaaaggauuuugug

SEQ ID NO: 8534 - RNA, 22 nt, Unknown
  Description of Unknown: Target viral genome RNA sequence
caaauccuaaaggauuuuguga

SEQ ID NO: 8535 - RNA, 22 nt, Unknown
  Description of Unknown: Target viral genome RNA sequence
aguaauagguuuccuauuccuu

SEQ ID NO: 8536 - RNA, 22 nt, Unknown
  Description of Unknown: Target viral genome RNA sequence
ccuaguaauagguuuccuauuc

SEQ ID NO: 8537 - RNA, 22 nt, Unknown
  Description of Unknown: Target viral genome RNA sequence
accuaguaauagguuuccuauu

SEQ ID NO: 8538 - RNA, 22 nt, Unknown
  Description of Unknown: Target viral genome RNA sequence
uaguaauagguuuccuauuccu

SEQ ID NO: 8539 - RNA, 22 nt, Unknown
  Description of Unknown: Target viral genome RNA sequence
cuaguaauagguuuccuauucc

SEQ ID NO: 8540 - RNA, 22 nt, Unknown
  Description of Unknown: Target viral genome RNA sequence
acuaaucagacaaggaacugau

SEQ ID NO: 8541 - RNA, 22 nt, Unknown
  Description of Unknown: Target viral genome RNA sequence
gaacuaaucagacaaggaacug

SEQ ID NO: 8542 - RNA, 22 nt, Unknown
  Description of Unknown: Target viral genome RNA sequence
aacuaaucagacaaggaacuga

SEQ ID NO: 8543 - RNA, 22 nt, Unknown
  Description of Unknown: Target viral genome RNA sequence
uaaucagacaaggaacugauua

SEQ ID NO: 8544 - RNA, 22 nt, Unknown
  Description of Unknown: Target viral genome RNA sequence
aaucagacaaggaacugauuac

SEQ ID NO: 8545 - RNA, 22 nt, Unknown
  Description of Unknown: Target viral genome RNA sequence
guuagaauguacaucuucuuug

SEQ ID NO: 8546 - RNA, 22 nt, Unknown
  Description of Unknown: Target viral genome RNA sequence
uuagaauguacaucuucuuugc

SEQ ID NO: 8547 - RNA, 22 nt, Unknown
  Description of Unknown: Target viral genome RNA sequence
uuuugauguuguuagacaaugc

SEQ ID NO: 8548 - RNA, 22 nt, Unknown
  Description of Unknown: Target viral genome RNA sequence
gguuagaauguacaucuucuuu

SEQ ID NO: 8549 - RNA, 22 nt, Unknown
  Description of Unknown: Target viral genome RNA sequence
augguuagaauguacaucuucu

SEQ ID NO: 8550 - RNA, 22 nt, Unknown
  Description of Unknown: Target viral genome RNA sequence
guguugguuuuaacauagauua

SEQ ID NO: 8551 - RNA, 22 nt, Unknown
  Description of Unknown: Target viral genome RNA sequence
uguugguuuuaacauagauuau

SEQ ID NO: 8552 - RNA, 22 nt, Unknown
  Description of Unknown: Target viral genome RNA sequence
guugguuuuaacauagauuaug

SEQ ID NO: 8553 - RNA, 22 nt, Unknown
  Description of Unknown: Target viral genome RNA sequence
uugguuuuaacauagauuauga

SEQ ID NO: 8554 - RNA, 22 nt, Unknown
  Description of Unknown: Target viral genome RNA sequence
ucuagguuucguccggguguga

SEQ ID NO: 8555 - RNA, 22 nt, Unknown
  Description of Unknown: Target viral genome RNA sequence
aucuagguuucguccgggugug

SEQ ID NO: 8556 - RNA, 22 nt, Unknown
  Description of Unknown: Target viral genome RNA sequence
gacagagaauuacaucuuucau

SEQ ID NO: 8557 - RNA, 22 nt, Unknown
  Description of Unknown: Target viral genome RNA sequence
ugacagagaauuacaucuuuca

SEQ ID NO: 8558 - RNA, 22 nt, Unknown
  Description of Unknown: Target viral genome RNA sequence
cugacagagaauuacaucuuuc

SEQ ID NO: 8559 - RNA, 22 nt, Unknown
  Description of Unknown: Target viral genome RNA sequence
ucugacagagaauuacaucuuu

SEQ ID NO: 8560 - RNA, 22 nt, Unknown
  Description of Unknown: Target viral genome RNA sequence
auuuugaugaagguaauuguga

SEQ ID NO: 8561 - RNA, 22 nt, Unknown
  Description of Unknown: Target viral genome RNA sequence
cauuuugaugaagguaauugug

SEQ ID NO: 8562 - RNA, 22 nt, Unknown
  Description of Unknown: Target viral genome RNA sequence
cuauuuguaguugaaguuguug

SEQ ID NO: 8563 - RNA, 22 nt, Unknown
  Description of Unknown: Target viral genome RNA sequence
auuuguaguugaaguuguugau

SEQ ID NO: 8564 - RNA, 22 nt, Unknown
  Description of Unknown: Target viral genome RNA sequence
uauuuguaguugaaguuguuga

SEQ ID NO: 8565 - RNA, 22 nt, Unknown
  Description of Unknown: Target viral genome RNA sequence
ugacucagguuuugcugcauac

SEQ ID NO: 8566 - RNA, 22 nt, Unknown
  Description of Unknown: Target viral genome RNA sequence
gacucagguuuugcugcauaca

SEQ ID NO: 8567 - RNA, 22 nt, Unknown
  Description of Unknown: Target viral genome RNA sequence
gugcaccuacacuagugccaca

SEQ ID NO: 8568 - RNA, 22 nt, Unknown
  Description of Unknown: Target viral genome RNA sequence
ugcaccuacacuagugccacaa

SEQ ID NO: 8569 - RNA, 22 nt, Unknown
  Description of Unknown: Target viral genome RNA sequence
agugcaccuacacuagugccac

SEQ ID NO: 8570 - RNA, 22 nt, Unknown
  Description of Unknown: Target viral genome RNA sequence
uaccauuugcuaugcaaauggc

SEQ ID NO: 8571 - RNA, 22 nt, Unknown
  Description of Unknown: Target viral genome RNA sequence
aaauaccauuugcuaugcaaau

SEQ ID NO: 8572 - RNA, 22 nt, Unknown
  Description of Unknown: Target viral genome RNA sequence
caaauaccauuugcuaugcaaa

SEQ ID NO: 8573 - RNA, 22 nt, Unknown
  Description of Unknown: Target viral genome RNA sequence
auaccauuugcuaugcaaaugg

SEQ ID NO: 8574 - RNA, 22 nt, Unknown
  Description of Unknown: Target viral genome RNA sequence
aauaccauuugcuaugcaaaug

SEQ ID NO: 8575 - RNA, 22 nt, Unknown
  Description of Unknown: Target viral genome RNA sequence
cuggucuaaacgaacuaaauau

SEQ ID NO: 8576 - RNA, 22 nt, Unknown
  Description of Unknown: Target viral genome RNA sequence
uggucuaaacgaacuaaauauu

SEQ ID NO: 8577 - RNA, 22 nt, Unknown
  Description of Unknown: Target viral genome RNA sequence
cuaauacugugaucugggacua

SEQ ID NO: 8578 - RNA, 22 nt, Unknown
  Description of Unknown: Target viral genome RNA sequence
uaauacugugaucugggacuac

SEQ ID NO: 8579 - RNA, 22 nt, Unknown
  Description of Unknown: Target viral genome RNA sequence
ugcuaauacugugaucugggac

SEQ ID NO: 8580 - RNA, 22 nt, Unknown
  Description of Unknown: Target viral genome RNA sequence
gcuaauacugugaucugggacu

SEQ ID NO: 8581 - RNA, 22 nt, Unknown
  Description of Unknown: Target viral genome RNA sequence
gcugcuaauacugugaucuggg

SEQ ID NO: 8582 - RNA, 22 nt, Unknown
  Description of Unknown: Target viral genome RNA sequence
cugcuaauacugugaucuggga

SEQ ID NO: 8583 - RNA, 22 nt, Unknown
  Description of Unknown: Target viral genome RNA sequence
ccaccuacaaguuuuggaccac

SEQ ID NO: 8584 - RNA, 22 nt, Unknown
  Description of Unknown: Target viral genome RNA sequence
acccuaacauguuuaucacccg

SEQ ID NO: 8585 - RNA, 22 nt, Unknown
  Description of Unknown: Target viral genome RNA sequence
uacccuaacauguuuaucaccc

SEQ ID NO: 8586 - RNA, 22 nt, Unknown
  Description of Unknown: Target viral genome RNA sequence
augguuacccuaacauguuuau

SEQ ID NO: 8587 - RNA, 22 nt, Unknown
  Description of Unknown: Target viral genome RNA sequence
aaugguuacccuaacauguuua

SEQ ID NO: 8588 - RNA, 22 nt, Unknown
  Description of Unknown: Target viral genome RNA sequence
uuacccuaacauguuuaucacc

SEQ ID NO: 8589 - RNA, 22 nt, Unknown
  Description of Unknown: Target viral genome RNA sequence
guuacccuaacauguuuaucac

SEQ ID NO: 8590 - RNA, 22 nt, Unknown
  Description of Unknown: Target viral genome RNA sequence
gguuacccuaacauguuuauca

SEQ ID NO: 8591 - RNA, 22 nt, Unknown
  Description of Unknown: Target viral genome RNA sequence
ugguuacccuaacauguuuauc

SEQ ID NO: 8592 - RNA, 22 nt, Unknown
  Description of Unknown: Target viral genome RNA sequence
acugaaacagcucacucuugua

SEQ ID NO: 8593 - RNA, 22 nt, Unknown
  Description of Unknown: Target viral genome RNA sequence
gaaacagcucacucuuguaaug

SEQ ID NO: 8594 - RNA, 22 nt, Unknown
  Description of Unknown: Target viral genome RNA sequence
caauggaaccuaguaauagguu

SEQ ID NO: 8595 - RNA, 22 nt, Unknown
  Description of Unknown: Target viral genome RNA sequence
agacggugacaugguaccacau

SEQ ID NO: 8596 - RNA, 22 nt, Unknown
  Description of Unknown: Target viral genome RNA sequence
gacggugacaugguaccacaua

SEQ ID NO: 8597 - RNA, 22 nt, Unknown
  Description of Unknown: Target viral genome RNA sequence
uagacggugacaugguaccaca

SEQ ID NO: 8598 - RNA, 22 nt, Unknown
  Description of Unknown: Target viral genome RNA sequence
ggugacaugguaccacauauau

SEQ ID NO: 8599 - RNA, 22 nt, Unknown
  Description of Unknown: Target viral genome RNA sequence
gugacaugguaccacauauauc

SEQ ID NO: 8600 - RNA, 22 nt, Unknown
  Description of Unknown: Target viral genome RNA sequence
acggugacaugguaccacauau

SEQ ID NO: 8601 - RNA, 22 nt, Unknown
  Description of Unknown: Target viral genome RNA sequence
cggugacaugguaccacauaua

SEQ ID NO: 8602 - RNA, 22 nt, Unknown
  Description of Unknown: Target viral genome RNA sequence
ugacaugguaccacauauauca

SEQ ID NO: 8603 - RNA, 22 nt, Unknown
  Description of Unknown: Target viral genome RNA sequence
gacaugguaccacauauaucac

SEQ ID NO: 8604 - RNA, 22 nt, Unknown
  Description of Unknown: Target viral genome RNA sequence
guagaucuguucucuaaacgaa

SEQ ID NO: 8605 - RNA, 22 nt, Unknown
  Description of Unknown: Target viral genome RNA sequence
cuuauaauucacagaaugcugu

SEQ ID NO: 8606 - RNA, 22 nt, Unknown
  Description of Unknown: Target viral genome RNA sequence
ccuuauaauucacagaaugcug

SEQ ID NO: 8607 - RNA, 22 nt, Unknown
  Description of Unknown: Target viral genome RNA sequence
accuuauaauucacagaaugcu

SEQ ID NO: 8608 - RNA, 22 nt, Unknown
  Description of Unknown: Target viral genome RNA sequence
caccuuauaauucacagaaugc

SEQ ID NO: 8609 - RNA, 22 nt, Unknown
  Description of Unknown: Target viral genome RNA sequence
auaauucacagaaugcuguagc

SEQ ID NO: 8610 - RNA, 22 nt, Unknown
  Description of Unknown: Target viral genome RNA sequence
uauaauucacagaaugcuguag

SEQ ID NO: 8611 - RNA, 22 nt, Unknown
  Description of Unknown: Target viral genome RNA sequence
uuauaauucacagaaugcugua

SEQ ID NO: 8612 - RNA, 22 nt, Unknown
  Description of Unknown: Target viral genome RNA sequence
ggucuaaacgaacuaaauauua

SEQ ID NO: 8613 - RNA, 22 nt, Unknown
  Description of Unknown: Target viral genome RNA sequence
auacaucaccagauguugauuu

SEQ ID NO: 8614 - RNA, 22 nt, Unknown
  Description of Unknown: Target viral genome RNA sequence
ucauacaucaccagauguugau

SEQ ID NO: 8615 - RNA, 22 nt, Unknown
  Description of Unknown: Target viral genome RNA sequence
cauacaucaccagauguugauu

SEQ ID NO: 8616 - RNA, 22 nt, Unknown
  Description of Unknown: Target viral genome RNA sequence
aaucauacaucaccagauguug

SEQ ID NO: 8617 - RNA, 22 nt, Unknown
  Description of Unknown: Target viral genome RNA sequence
aucauacaucaccagauguuga

SEQ ID NO: 8618 - RNA, 22 nt, Unknown
  Description of Unknown: Target viral genome RNA sequence
agaaucauacaucaccagaugu

SEQ ID NO: 8619 - RNA, 22 nt, Unknown
  Description of Unknown: Target viral genome RNA sequence
gaaucauacaucaccagauguu

SEQ ID NO: 8620 - RNA, 22 nt, Unknown
  Description of Unknown: Target viral genome RNA sequence
uacugaugucguauacagggcu

SEQ ID NO: 8621 - RNA, 22 nt, Unknown
  Description of Unknown: Target viral genome RNA sequence
acugaugucguauacagggcuu

SEQ ID NO: 8622 - RNA, 22 nt, Unknown
  Description of Unknown: Target viral genome RNA sequence
cugaugucguauacagggcuuu

SEQ ID NO: 8623 - RNA, 22 nt, Unknown
  Description of Unknown: Target viral genome RNA sequence
ugaugucguauacagggcuuuu

SEQ ID NO: 8624 - RNA, 22 nt, Unknown
  Description of Unknown: Target viral genome RNA sequence
cuaguacugaugucguauacag

SEQ ID NO: 8625 - RNA, 22 nt, Unknown
  Description of Unknown: Target viral genome RNA sequence
uaguacugaugucguauacagg

SEQ ID NO: 8626 - RNA, 22 nt, Unknown
  Description of Unknown: Target viral genome RNA sequence
aguacugaugucguauacaggg

SEQ ID NO: 8627 - RNA, 22 nt, Unknown
  Description of Unknown: Target viral genome RNA sequence
guacugaugucguauacagggc

SEQ ID NO: 8628 - RNA, 22 nt, Unknown
  Description of Unknown: Target viral genome RNA sequence
gaugucguauacagggcuuuug

SEQ ID NO: 8629 - RNA, 22 nt, Unknown
  Description of Unknown: Target viral genome RNA sequence
augucguauacagggcuuuuga

SEQ ID NO: 8630 - RNA, 22 nt, Unknown
  Description of Unknown: Target viral genome RNA sequence
cuaagcgcaacauuaaaccagu

SEQ ID NO: 8631 - RNA, 22 nt, Unknown
  Description of Unknown: Target viral genome RNA sequence
gcuaagcgcaacauuaaaccag

SEQ ID NO: 8632 - RNA, 22 nt, Unknown
  Description of Unknown: Target viral genome RNA sequence
accuaggaacugggccagaagc

SEQ ID NO: 8633 - RNA, 22 nt, Unknown
  Description of Unknown: Target viral genome RNA sequence
uaccuaggaacugggccagaag

SEQ ID NO: 8634 - RNA, 22 nt, Unknown
  Description of Unknown: Target viral genome RNA sequence
ccuaggaacugggccagaagcu

SEQ ID NO: 8635 - RNA, 22 nt, Unknown
  Description of Unknown: Target viral genome RNA sequence
gaggagcuacuguaguaauugg

SEQ ID NO: 8636 - RNA, 22 nt, Unknown
  Description of Unknown: Target viral genome RNA sequence
aggagcuacuguaguaauugga

SEQ ID NO: 8637 - RNA, 22 nt, Unknown
  Description of Unknown: Target viral genome RNA sequence
ccacuagaggagcuacuguagu

SEQ ID NO: 8638 - RNA, 22 nt, Unknown
  Description of Unknown: Target viral genome RNA sequence
cacuagaggagcuacuguagua

SEQ ID NO: 8639 - RNA, 22 nt, Unknown
  Description of Unknown: Target viral genome RNA sequence
cgccacuagaggagcuacugua

SEQ ID NO: 8640 - RNA, 22 nt, Unknown
  Description of Unknown: Target viral genome RNA sequence
gccacuagaggagcuacuguag

SEQ ID NO: 8641 - RNA, 22 nt, Unknown
  Description of Unknown: Target viral genome RNA sequence
uagaggagcuacuguaguaauu

SEQ ID NO: 8642 - RNA, 22 nt, Unknown
  Description of Unknown: Target viral genome RNA sequence
agaggagcuacuguaguaauug

SEQ ID NO: 8643 - RNA, 22 nt, Unknown
  Description of Unknown: Target viral genome RNA sequence
acuagaggagcuacuguaguaa

SEQ ID NO: 8644 - RNA, 22 nt, Unknown
  Description of Unknown: Target viral genome RNA sequence
cuagaggagcuacuguaguaau

SEQ ID NO: 8645 - RNA, 22 nt, Unknown
  Description of Unknown: Target viral genome RNA sequence
acugguaagagucauuuugcua

SEQ ID NO: 8646 - RNA, 22 nt, Unknown
  Description of Unknown: Target viral genome RNA sequence
uacugguaagagucauuuugcu

SEQ ID NO: 8647 - RNA, 22 nt, Unknown
  Description of Unknown: Target viral genome RNA sequence
cugguaagagucauuuugcuau

SEQ ID NO: 8648 - RNA, 22 nt, Unknown
  Description of Unknown: Target viral genome RNA sequence
cacuuaugauugaacgguucgu

SEQ ID NO: 8649 - RNA, 22 nt, Unknown
  Description of Unknown: Target viral genome RNA sequence
acacuuaugauugaacgguucg

SEQ ID NO: 8650 - RNA, 22 nt, Unknown
  Description of Unknown: Target viral genome RNA sequence
uacacuuaugauugaacgguuc

SEQ ID NO: 8651 - RNA, 22 nt, Unknown
  Description of Unknown: Target viral genome RNA sequence
guacacuuaugauugaacgguu

SEQ ID NO: 8652 - RNA, 22 nt, Unknown
  Description of Unknown: Target viral genome RNA sequence
uuaugauugaacgguucguguc

SEQ ID NO: 8653 - RNA, 22 nt, Unknown
  Description of Unknown: Target viral genome RNA sequence
cuuaugauugaacgguucgugu

SEQ ID NO: 8654 - RNA, 22 nt, Unknown
  Description of Unknown: Target viral genome RNA sequence
acuuaugauugaacgguucgug

SEQ ID NO: 8655 - RNA, 22 nt, Unknown
  Description of Unknown: Target viral genome RNA sequence
ugagacugaccuuacuaaagga

SEQ ID NO: 8656 - RNA, 22 nt, Unknown
  Description of Unknown: Target viral genome RNA sequence
ggacugagacugaccuuacuaa

SEQ ID NO: 8657 - RNA, 22 nt, Unknown
  Description of Unknown: Target viral genome RNA sequence
ccacacaaggcagaugggcuau

SEQ ID NO: 8658 - RNA, 22 nt, Unknown
  Description of Unknown: Target viral genome RNA sequence
cacacaaggcagaugggcuaua

SEQ ID NO: 8659 - RNA, 22 nt, Unknown
  Description of Unknown: Target viral genome RNA sequence
agaccacacaaggcagaugggc

SEQ ID NO: 8660 - RNA, 22 nt, Unknown
  Description of Unknown: Target viral genome RNA sequence
gaccacacaaggcagaugggcu

SEQ ID NO: 8661 - RNA, 22 nt, Unknown
  Description of Unknown: Target viral genome RNA sequence
accacacaaggcagaugggcua

SEQ ID NO: 8662 - RNA, 22 nt, Unknown
  Description of Unknown: Target viral genome RNA sequence
ucgcgcauuggcauggaaguca

SEQ ID NO: 8663 - RNA, 22 nt, Unknown
  Description of Unknown: Target viral genome RNA sequence
cgcgcauuggcauggaagucac

SEQ ID NO: 8664 - RNA, 22 nt, Unknown
  Description of Unknown: Target viral genome RNA sequence
ugucgcgcauuggcauggaagu

SEQ ID NO: 8665 - RNA, 22 nt, Unknown
  Description of Unknown: Target viral genome RNA sequence
gucgcgcauuggcauggaaguc

SEQ ID NO: 8666 - RNA, 22 nt, Unknown
  Description of Unknown: Target viral genome RNA sequence
aaugucgcgcauuggcauggaa

SEQ ID NO: 8667 - RNA, 22 nt, Unknown
  Description of Unknown: Target viral genome RNA sequence
augucgcgcauuggcauggaag

SEQ ID NO: 8668 - RNA, 22 nt, Unknown
  Description of Unknown: Target viral genome RNA sequence
ggaaugucgcgcauuggcaugg

SEQ ID NO: 8669 - RNA, 22 nt, Unknown
  Description of Unknown: Target viral genome RNA sequence
gaaugucgcgcauuggcaugga

SEQ ID NO: 8670 - RNA, 22 nt, Unknown
  Description of Unknown: Target viral genome RNA sequence
aacuguuuauagugauguagaa

SEQ ID NO: 8671 - RNA, 22 nt, Unknown
  Description of Unknown: Target viral genome RNA sequence
aaacuguuuauagugauguaga

SEQ ID NO: 8672 - RNA, 22 nt, Unknown
  Description of Unknown: Target viral genome RNA sequence
ugcugauuauaauuauaaauua

SEQ ID NO: 8673 - RNA, 22 nt, Unknown
  Description of Unknown: Target viral genome RNA sequence
ucguuccucaucacguagucgc

SEQ ID NO: 8674 - RNA, 22 nt, Unknown
  Description of Unknown: Target viral genome RNA sequence
cucguuccucaucacguagucg

SEQ ID NO: 8675 - RNA, 22 nt, Unknown
  Description of Unknown: Target viral genome RNA sequence
gcuaaaucugaauuugaccgug

SEQ ID NO: 8676 - RNA, 22 nt, Unknown
  Description of Unknown: Target viral genome RNA sequence
cuaaaucugaauuugaccguga

SEQ ID NO: 8677 - RNA, 22 nt, Unknown
  Description of Unknown: Target viral genome RNA sequence
uggcuaaaucugaauuugaccg

SEQ ID NO: 8678 - RNA, 22 nt, Unknown
  Description of Unknown: Target viral genome RNA sequence
ggcuaaaucugaauuugaccgu

SEQ ID NO: 8679 - RNA, 22 nt, Unknown
  Description of Unknown: Target viral genome RNA sequence
uguggcuaaaucugaauuugac

SEQ ID NO: 8680 - RNA, 22 nt, Unknown
  Description of Unknown: Target viral genome RNA sequence
guggcuaaaucugaauuugacc

SEQ ID NO: 8681 - RNA, 22 nt, Unknown
  Description of Unknown: Target viral genome RNA sequence
aauguggcuaaaucugaauuug

SEQ ID NO: 8682 - RNA, 22 nt, Unknown
  Description of Unknown: Target viral genome RNA sequence
auguggcuaaaucugaauuuga

SEQ ID NO: 8683 - RNA, 22 nt, Unknown
  Description of Unknown: Target viral genome RNA sequence
cccaagguuuacccaauaauac

SEQ ID NO: 8684 - RNA, 22 nt, Unknown
  Description of Unknown: Target viral genome RNA sequence
ccaagguuuacccaauaauacu

SEQ ID NO: 8685 - RNA, 22 nt, Unknown
  Description of Unknown: Target viral genome RNA sequence
guccagacauguuccucggaac

SEQ ID NO: 8686 - RNA, 22 nt, Unknown
  Description of Unknown: Target viral genome RNA sequence
uccagacauguuccucggaacu

SEQ ID NO: 8687 - RNA, 22 nt, Unknown
  Description of Unknown: Target viral genome RNA sequence
cggccccaagguuuacccaaua

SEQ ID NO: 8688 - RNA, 22 nt, Unknown
  Description of Unknown: Target viral genome RNA sequence
ggccccaagguuuacccaauaa

SEQ ID NO: 8689 - RNA, 22 nt, Unknown
  Description of Unknown: Target viral genome RNA sequence
cuauagguccagacauguuccu

SEQ ID NO: 8690 - RNA, 22 nt, Unknown
  Description of Unknown: Target viral genome RNA sequence
aacuauagguccagacauguuc

SEQ ID NO: 8691 - RNA, 22 nt, Unknown
  Description of Unknown: Target viral genome RNA sequence
agguccagacauguuccucgga

SEQ ID NO: 8692 - RNA, 22 nt, Unknown
  Description of Unknown: Target viral genome RNA sequence
gguccagacauguuccucggaa

SEQ ID NO: 8693 - RNA, 22 nt, Unknown
  Description of Unknown: Target viral genome RNA sequence
auagguccagacauguuccucg

SEQ ID NO: 8694 - RNA, 22 nt, Unknown
  Description of Unknown: Target viral genome RNA sequence
uagguccagacauguuccucgg

SEQ ID NO: 8695 - RNA, 22 nt, Unknown
  Description of Unknown: Target viral genome RNA sequence
cauugugcaaacuuuaauguuu

SEQ ID NO: 8696 - RNA, 22 nt, Unknown
  Description of Unknown: Target viral genome RNA sequence
cugcauugugcaaacuuuaaug

SEQ ID NO: 8697 - RNA, 22 nt, Unknown
  Description of Unknown: Target viral genome RNA sequence
ugcauugugcaaacuuuaaugu

SEQ ID NO: 8698 - RNA, 22 nt, Unknown
  Description of Unknown: Target viral genome RNA sequence
ugugcaaacuuuaauguuuuau

SEQ ID NO: 8699 - RNA, 22 nt, Unknown
  Description of Unknown: Target viral genome RNA sequence
gugcaaacuuuaauguuuuauu

SEQ ID NO: 8700 - RNA, 22 nt, Unknown
  Description of Unknown: Target viral genome RNA sequence
auugugcaaacuuuaauguuuu

SEQ ID NO: 8701 - RNA, 22 nt, Unknown
  Description of Unknown: Target viral genome RNA sequence
ccaucaaauuggaugacaaaga

SEQ ID NO: 8702 - RNA, 22 nt, Unknown
  Description of Unknown: Target viral genome RNA sequence
gccaucaaauuggaugacaaag

SEQ ID NO: 8703 - RNA, 22 nt, Unknown
  Description of Unknown: Target viral genome RNA sequence
caucaaauuggaugacaaagau

SEQ ID NO: 8704 - RNA, 22 nt, Unknown
  Description of Unknown: Target viral genome RNA sequence
uacauaaucaggauguaaacuu

SEQ ID NO: 8705 - RNA, 22 nt, Unknown
  Description of Unknown: Target viral genome RNA sequence
gacuaugucauauucacucaaa

SEQ ID NO: 8706 - RNA, 22 nt, Unknown
  Description of Unknown: Target viral genome RNA sequence
acuaugucauauucacucaaac

SEQ ID NO: 8707 - RNA, 22 nt, Unknown
  Description of Unknown: Target viral genome RNA sequence
augacuaugucauauucacuca

SEQ ID NO: 8708 - RNA, 22 nt, Unknown
  Description of Unknown: Target viral genome RNA sequence
ugacuaugucauauucacucaa

SEQ ID NO: 8709 - RNA, 22 nt, Unknown
  Description of Unknown: Target viral genome RNA sequence
auaugacuaugucauauucacu

SEQ ID NO: 8710 - RNA, 22 nt, Unknown
  Description of Unknown: Target viral genome RNA sequence
uaugacuaugucauauucacuc

SEQ ID NO: 8711 - RNA, 22 nt, Unknown
  Description of Unknown: Target viral genome RNA sequence
gaauaugacuaugucauauuca

SEQ ID NO: 8712 - RNA, 22 nt, Unknown
  Description of Unknown: Target viral genome RNA sequence
aauaugacuaugucauauucac

SEQ ID NO: 8713 - RNA, 22 nt, Unknown
  Description of Unknown: Target viral genome RNA sequence
caaccuaaauagagguauggua

SEQ ID NO: 8714 - RNA, 22 nt, Unknown
  Description of Unknown: Target viral genome RNA sequence
acaaccuaaauagagguauggu

SEQ ID NO: 8715 - RNA, 22 nt, Unknown
  Description of Unknown: Target viral genome RNA sequence
accuaaauagagguaugguacu

SEQ ID NO: 8716 - RNA, 22 nt, Unknown
  Description of Unknown: Target viral genome RNA sequence
aaccuaaauagagguaugguac

SEQ ID NO: 8717 - RNA, 22 nt, Unknown
  Description of Unknown: Target viral genome RNA sequence
uaaacaaccuaaauagagguau

SEQ ID NO: 8718 - RNA, 22 nt, Unknown
  Description of Unknown: Target viral genome RNA sequence
uuaaacaaccuaaauagaggua

SEQ ID NO: 8719 - RNA, 22 nt, Unknown
  Description of Unknown: Target viral genome RNA sequence
aacaaccuaaauagagguaugg

SEQ ID NO: 8720 - RNA, 22 nt, Unknown
  Description of Unknown: Target viral genome RNA sequence
aaacaaccuaaauagagguaug

SEQ ID NO: 8721 - RNA, 22 nt, Unknown
  Description of Unknown: Target viral genome RNA sequence
uucaaacugucaaacccgguaa

SEQ ID NO: 8722 - RNA, 22 nt, Unknown
  Description of Unknown: Target viral genome RNA sequence
ucaaacugucaaacccgguaau

SEQ ID NO: 8723 - RNA, 22 nt, Unknown
  Description of Unknown: Target viral genome RNA sequence
uugcuuuucaaacugucaaacc

SEQ ID NO: 8724 - RNA, 22 nt, Unknown
  Description of Unknown: Target viral genome RNA sequence
uguugcuuuucaaacugucaaa

SEQ ID NO: 8725 - RNA, 22 nt, Unknown
  Description of Unknown: Target viral genome RNA sequence
guugcuuuucaaacugucaaac

SEQ ID NO: 8726 - RNA, 22 nt, Unknown
  Description of Unknown: Target viral genome RNA sequence
uuuucaaacugucaaacccggu

SEQ ID NO: 8727 - RNA, 22 nt, Unknown
  Description of Unknown: Target viral genome RNA sequence
uuucaaacugucaaacccggua

SEQ ID NO: 8728 - RNA, 22 nt, Unknown
  Description of Unknown: Target viral genome RNA sequence
cuuuucaaacugucaaacccgg

SEQ ID NO: 8729 - RNA, 22 nt, Unknown
  Description of Unknown: Target viral genome RNA sequence
acucccuuucggauggcuuauu

SEQ ID NO: 8730 - RNA, 22 nt, Unknown
  Description of Unknown: Target viral genome RNA sequence
cacucccuuucggauggcuuau

SEQ ID NO: 8731 - RNA, 22 nt, Unknown
  Description of Unknown: Target viral genome RNA sequence
aacaacuuagcuccaauuuugg

SEQ ID NO: 8732 - RNA, 22 nt, Unknown
  Description of Unknown: Target viral genome RNA sequence
acaacuuagcuccaauuuuggu

SEQ ID NO: 8733 - RNA, 22 nt, Unknown
  Description of Unknown: Target viral genome RNA sequence
cuuguuaaacaacuuagcucca

SEQ ID NO: 8734 - RNA, 22 nt, Unknown
  Description of Unknown: Target viral genome RNA sequence
uuguuaaacaacuuagcuccaa

SEQ ID NO: 8735 - RNA, 22 nt, Unknown
  Description of Unknown: Target viral genome RNA sequence
uguuaaacaacuuagcuccaau

SEQ ID NO: 8736 - RNA, 22 nt, Unknown
  Description of Unknown: Target viral genome RNA sequence
guuaaacaacuuagcuccaauu

SEQ ID NO: 8737 - RNA, 22 nt, Unknown
  Description of Unknown: Target viral genome RNA sequence
uuaaacaacuuagcuccaauuu

SEQ ID NO: 8738 - RNA, 22 nt, Unknown
  Description of Unknown: Target viral genome RNA sequence
uaaacaacuuagcuccaauuuu

SEQ ID NO: 8739 - RNA, 22 nt, Unknown
  Description of Unknown: Target viral genome RNA sequence
aaacaacuuagcuccaauuuug

SEQ ID NO: 8740 - RNA, 22 nt, Unknown
  Description of Unknown: Target viral genome RNA sequence
cguacugcugcaauauuguuaa

SEQ ID NO: 8741 - RNA, 22 nt, Unknown
  Description of Unknown: Target viral genome RNA sequence
gcguacugcugcaauauuguua

SEQ ID NO: 8742 - RNA, 22 nt, Unknown
  Description of Unknown: Target viral genome RNA sequence
ugcaauauuguuaacgugaguc

SEQ ID NO: 8743 - RNA, 22 nt, Unknown
  Description of Unknown: Target viral genome RNA sequence
cugcaauauuguuaacgugagu

SEQ ID NO: 8744 - RNA, 22 nt, Unknown
  Description of Unknown: Target viral genome RNA sequence
uaaaucugaauuugaccgugau

SEQ ID NO: 8745 - RNA, 22 nt, Unknown
  Description of Unknown: Target viral genome RNA sequence
aaaucugaauuugaccgugaug

SEQ ID NO: 8746 - RNA, 22 nt, Unknown
  Description of Unknown: Target viral genome RNA sequence
cuucuauuugugcuuuuuagcc

SEQ ID NO: 8747 - RNA, 22 nt, Unknown
  Description of Unknown: Target viral genome RNA sequence
acuucuauuugugcuuuuuagc

SEQ ID NO: 8748 - RNA, 22 nt, Unknown
  Description of Unknown: Target viral genome RNA sequence
gacuucuauuugugcuuuuuag

SEQ ID NO: 8749 - RNA, 22 nt, Unknown
  Description of Unknown: Target viral genome RNA sequence
ugacuucuauuugugcuuuuua

SEQ ID NO: 8750 - RNA, 22 nt, Unknown
  Description of Unknown: Target viral genome RNA sequence
uugacuucuauuugugcuuuuu

SEQ ID NO: 8751 - RNA, 22 nt, Unknown
  Description of Unknown: Target viral genome RNA sequence
auugacuucuauuugugcuuuu

SEQ ID NO: 8752 - RNA, 22 nt, Unknown
  Description of Unknown: Target viral genome RNA sequence
aauugacuucuauuugugcuuu

SEQ ID NO: 8753 - RNA, 22 nt, Unknown
  Description of Unknown: Target viral genome RNA sequence
uaauugacuucuauuugugcuu

SEQ ID NO: 8754 - RNA, 22 nt, Unknown
  Description of Unknown: Target viral genome RNA sequence
ucuauuugugcuuuuuagccuu

SEQ ID NO: 8755 - RNA, 22 nt, Unknown
  Description of Unknown: Target viral genome RNA sequence
uucuauuugugcuuuuuagccu

SEQ ID NO: 8756 - RNA, 22 nt, Unknown
  Description of Unknown: Target viral genome RNA sequence
ucacauuggcacccgcaauccu

SEQ ID NO: 8757 - RNA, 22 nt, Unknown
  Description of Unknown: Target viral genome RNA sequence
aucacauuggcacccgcaaucc

SEQ ID NO: 8758 - RNA, 22 nt, Unknown
  Description of Unknown: Target viral genome RNA sequence
cacauuggcacccgcaauccug

SEQ ID NO: 8759 - RNA, 22 nt, Unknown
  Description of Unknown: Target viral genome RNA sequence
aagaucacauuggcacccgcaa

SEQ ID NO: 8760 - RNA, 22 nt, Unknown
  Description of Unknown: Target viral genome RNA sequence
aaagaucacauuggcacccgca

SEQ ID NO: 8761 - RNA, 22 nt, Unknown
  Description of Unknown: Target viral genome RNA sequence
gaucacauuggcacccgcaauc

SEQ ID NO: 8762 - RNA, 22 nt, Unknown
  Description of Unknown: Target viral genome RNA sequence
agaucacauuggcacccgcaau

SEQ ID NO: 8763 - RNA, 22 nt, Unknown
  Description of Unknown: Target viral genome RNA sequence
aagagcacuauguuagaauuac

SEQ ID NO: 8764 - RNA, 22 nt, Unknown
  Description of Unknown: Target viral genome RNA sequence
caagagcacuauguuagaauua

SEQ ID NO: 8765 - RNA, 22 nt, Unknown
  Description of Unknown: Target viral genome RNA sequence
ccacaagagcacuauguuagaa

SEQ ID NO: 8766 - RNA, 22 nt, Unknown
  Description of Unknown: Target viral genome RNA sequence
gccacaagagcacuauguuaga

SEQ ID NO: 8767 - RNA, 22 nt, Unknown
  Description of Unknown: Target viral genome RNA sequence
acaagagcacuauguuagaauu

SEQ ID NO: 8768 - RNA, 22 nt, Unknown
  Description of Unknown: Target viral genome RNA sequence
cacaagagcacuauguuagaau

SEQ ID NO: 8769 - RNA, 22 nt, Unknown
  Description of Unknown: Target viral genome RNA sequence
agugccacaagagcacuauguu

SEQ ID NO: 8770 - RNA, 22 nt, Unknown
  Description of Unknown: Target viral genome RNA sequence
uagugccacaagagcacuaugu

SEQ ID NO: 8771 - RNA, 22 nt, Unknown
  Description of Unknown: Target viral genome RNA sequence
ugccacaagagcacuauguuag

SEQ ID NO: 8772 - RNA, 22 nt, Unknown
  Description of Unknown: Target viral genome RNA sequence
gugccacaagagcacuauguua

SEQ ID NO: 8773 - RNA, 22 nt, Unknown
  Description of Unknown: Target viral genome RNA sequence
aaacgcucaaagcuacugagga

SEQ ID NO: 8774 - RNA, 22 nt, Unknown
  Description of Unknown: Target viral genome RNA sequence
gaaacgcucaaagcuacugagg

SEQ ID NO: 8775 - RNA, 22 nt, Unknown
  Description of Unknown: Target viral genome RNA sequence
agaaacgcucaaagcuacugag

SEQ ID NO: 8776 - RNA, 22 nt, Unknown
  Description of Unknown: Target viral genome RNA sequence
cagaaacgcucaaagcuacuga

SEQ ID NO: 8777 - RNA, 22 nt, Unknown
  Description of Unknown: Target viral genome RNA sequence
gcagaaacgcucaaagcuacug

SEQ ID NO: 8778 - RNA, 22 nt, Unknown
  Description of Unknown: Target viral genome RNA sequence
agcagaaacgcucaaagcuacu

SEQ ID NO: 8779 - RNA, 22 nt, Unknown
  Description of Unknown: Target viral genome RNA sequence
cagcagaaacgcucaaagcuac

SEQ ID NO: 8780 - RNA, 22 nt, Unknown
  Description of Unknown: Target viral genome RNA sequence
gcagcagaaacgcucaaagcua

SEQ ID NO: 8781 - RNA, 22 nt, Unknown
  Description of Unknown: Target viral genome RNA sequence
cuagguuuuucuacagguguua

SEQ ID NO: 8782 - RNA, 22 nt, Unknown
  Description of Unknown: Target viral genome RNA sequence
uagguuuuucuacagguguuaa

SEQ ID NO: 8783 - RNA, 22 nt, Unknown
  Description of Unknown: Target viral genome RNA sequence
agcuagguuuuucuacaggugu

SEQ ID NO: 8784 - RNA, 22 nt, Unknown
  Description of Unknown: Target viral genome RNA sequence
gcuagguuuuucuacagguguu

SEQ ID NO: 8785 - RNA, 22 nt, Unknown
  Description of Unknown: Target viral genome RNA sequence
cagcuagguuuuucuacaggug

SEQ ID NO: 8786 - RNA, 22 nt, Unknown
  Description of Unknown: Target viral genome RNA sequence
cagaacuggaaccaccuuguag

SEQ ID NO: 8787 - RNA, 22 nt, Unknown
  Description of Unknown: Target viral genome RNA sequence
agaacuggaaccaccuuguagg

SEQ ID NO: 8788 - RNA, 22 nt, Unknown
  Description of Unknown: Target viral genome RNA sequence
gaacuggaaccaccuuguaggu

SEQ ID NO: 8789 - RNA, 22 nt, Unknown
  Description of Unknown: Target viral genome RNA sequence
aacuggaaccaccuuguagguu

SEQ ID NO: 8790 - RNA, 22 nt, Unknown
  Description of Unknown: Target viral genome RNA sequence
acuggaaccaccuuguagguuu

SEQ ID NO: 8791 - RNA, 22 nt, Unknown
  Description of Unknown: Target viral genome RNA sequence
cuggaaccaccuuguagguuug

SEQ ID NO: 8792 - RNA, 22 nt, Unknown
  Description of Unknown: Target viral genome RNA sequence
uggaaccaccuuguagguuugu

SEQ ID NO: 8793 - RNA, 22 nt, Unknown
  Description of Unknown: Target viral genome RNA sequence
ggaaccaccuuguagguuuguu

SEQ ID NO: 8794 - RNA, 22 nt, Unknown
  Description of Unknown: Target viral genome RNA sequence
gaaccaccuuguagguuuguua

SEQ ID NO: 8795 - RNA, 22 nt, Unknown
  Description of Unknown: Target viral genome RNA sequence
aaccaccuuguagguuuguuac

SEQ ID NO: 8796 - RNA, 22 nt, Unknown
  Description of Unknown: Target viral genome RNA sequence
uggugaagcugcuaacuuuugu

SEQ ID NO: 8797 - RNA, 22 nt, Unknown
  Description of Unknown: Target viral genome RNA sequence
cuggugaagcugcuaacuuuug

SEQ ID NO: 8798 - RNA, 22 nt, Unknown
  Description of Unknown: Target viral genome RNA sequence
aauggccaugguacauuuggcu

SEQ ID NO: 8799 - RNA, 22 nt, Unknown
  Description of Unknown: Target viral genome RNA sequence
aaauggccaugguacauuuggc

SEQ ID NO: 8800 - RNA, 22 nt, Unknown
  Description of Unknown: Target viral genome RNA sequence
accuuccuuacccagauccauc

SEQ ID NO: 8801 - RNA, 22 nt, Unknown
  Description of Unknown: Target viral genome RNA sequence
ccuuccuuacccagauccauca

SEQ ID NO: 8802 - RNA, 22 nt, Unknown
  Description of Unknown: Target viral genome RNA sequence
guguaccuuccuuacccagauc

SEQ ID NO: 8803 - RNA, 22 nt, Unknown
  Description of Unknown: Target viral genome RNA sequence
uguaccuuccuuacccagaucc

SEQ ID NO: 8804 - RNA, 22 nt, Unknown
  Description of Unknown: Target viral genome RNA sequence
guaccuuccuuacccagaucca

SEQ ID NO: 8805 - RNA, 22 nt, Unknown
  Description of Unknown: Target viral genome RNA sequence
uaccuuccuuacccagauccau

SEQ ID NO: 8806 - RNA, 22 nt, Unknown
  Description of Unknown: Target viral genome RNA sequence
aaugucuaugcagauucauuug

SEQ ID NO: 8807 - RNA, 22 nt, Unknown
  Description of Unknown: Target viral genome RNA sequence
ugucuaugcagauucauuugua

SEQ ID NO: 8808 - RNA, 22 nt, Unknown
  Description of Unknown: Target viral genome RNA sequence
augucuaugcagauucauuugu

SEQ ID NO: 8809 - RNA, 22 nt, Unknown
  Description of Unknown: Target viral genome RNA sequence
uuguguacuuuuacuagaagua

SEQ ID NO: 8810 - RNA, 22 nt, Unknown
  Description of Unknown: Target viral genome RNA sequence
uguguacuuuuacuagaaguac

SEQ ID NO: 8811 - RNA, 22 nt, Unknown
  Description of Unknown: Target viral genome RNA sequence
caauuguguacuuuuacuagaa

SEQ ID NO: 8812 - RNA, 22 nt, Unknown
  Description of Unknown: Target viral genome RNA sequence
aauuguguacuuuuacuagaag

SEQ ID NO: 8813 - RNA, 22 nt, Unknown
  Description of Unknown: Target viral genome RNA sequence
auuguguacuuuuacuagaagu

SEQ ID NO: 8814 - RNA, 22 nt, Unknown
  Description of Unknown: Target viral genome RNA sequence
gcgucuugguucaccgcucuca

SEQ ID NO: 8815 - RNA, 22 nt, Unknown
  Description of Unknown: Target viral genome RNA sequence
cugcgucuugguucaccgcucu

SEQ ID NO: 8816 - RNA, 22 nt, Unknown
  Description of Unknown: Target viral genome RNA sequence
aauauugggaucagacauacca

SEQ ID NO: 8817 - RNA, 22 nt, Unknown
  Description of Unknown: Target viral genome RNA sequence
aaauauugggaucagacauacc

SEQ ID NO: 8818 - RNA, 22 nt, Unknown
  Description of Unknown: Target viral genome RNA sequence
guauugggaaccugaguuuuau

SEQ ID NO: 8819 - RNA, 22 nt, Unknown
  Description of Unknown: Target viral genome RNA sequence
uauugggaaccugaguuuuaug

SEQ ID NO: 8820 - RNA, 22 nt, Unknown
  Description of Unknown: Target viral genome RNA sequence
ggcguuccaauuaacaccaaua

SEQ ID NO: 8821 - RNA, 22 nt, Unknown
  Description of Unknown: Target viral genome RNA sequence
gcguuccaauuaacaccaauag

SEQ ID NO: 8822 - RNA, 22 nt, Unknown
  Description of Unknown: Target viral genome RNA sequence
ccuacuauaacucaaaugaauc

SEQ ID NO: 8823 - RNA, 22 nt, Unknown
  Description of Unknown: Target viral genome RNA sequence
cccuacuauaacucaaaugaau

SEQ ID NO: 8824 - RNA, 22 nt, Unknown
  Description of Unknown: Target viral genome RNA sequence
caucccuacuauaacucaaaug

SEQ ID NO: 8825 - RNA, 22 nt, Unknown
  Description of Unknown: Target viral genome RNA sequence
ucaucccuacuauaacucaaau

SEQ ID NO: 8826 - RNA, 22 nt, Unknown
  Description of Unknown: Target viral genome RNA sequence
ucccuacuauaacucaaaugaa

SEQ ID NO: 8827 - RNA, 22 nt, Unknown
  Description of Unknown: Target viral genome RNA sequence
aucccuacuauaacucaaauga

SEQ ID NO: 8828 - RNA, 22 nt, Unknown
  Description of Unknown: Target viral genome RNA sequence
augucaucccuacuauaacuca

SEQ ID NO: 8829 - RNA, 22 nt, Unknown
  Description of Unknown: Target viral genome RNA sequence
aaugucaucccuacuauaacuc

SEQ ID NO: 8830 - RNA, 22 nt, Unknown
  Description of Unknown: Target viral genome RNA sequence
gucaucccuacuauaacucaaa

SEQ ID NO: 8831 - RNA, 22 nt, Unknown
  Description of Unknown: Target viral genome RNA sequence
ugucaucccuacuauaacucaa

SEQ ID NO: 8832 - RNA, 22 nt, Unknown
  Description of Unknown: Target viral genome RNA sequence
acuauagguccagacauguucc

SEQ ID NO: 8833 - RNA, 22 nt, Unknown
  Description of Unknown: Target viral genome RNA sequence
uucuuugcucaggaugguaaug

SEQ ID NO: 8834 - RNA, 22 nt, Unknown
  Description of Unknown: Target viral genome RNA sequence
ucuuugcucaggaugguaaugc

SEQ ID NO: 8835 - RNA, 22 nt, Unknown
  Description of Unknown: Target viral genome RNA sequence
uuuaugauccuuugcaaccuga

SEQ ID NO: 8836 - RNA, 22 nt, Unknown
  Description of Unknown: Target viral genome RNA sequence
cucacauagcaaucuuuaauca

SEQ ID NO: 8837 - RNA, 22 nt, Unknown
  Description of Unknown: Target viral genome RNA sequence
ucucacauagcaaucuuuaauc

SEQ ID NO: 8838 - RNA, 22 nt, Unknown
  Description of Unknown: Target viral genome RNA sequence
uuuaaucucacauagcaaucuu

SEQ ID NO: 8839 - RNA, 22 nt, Unknown
  Description of Unknown: Target viral genome RNA sequence
cuuuaaucucacauagcaaucu

SEQ ID NO: 8840 - RNA, 22 nt, Unknown
  Description of Unknown: Target viral genome RNA sequence
acuuuaaucucacauagcaauc

SEQ ID NO: 8841 - RNA, 22 nt, Unknown
  Description of Unknown: Target viral genome RNA sequence
aacuuuaaucucacauagcaau

SEQ ID NO: 8842 - RNA, 22 nt, Unknown
  Description of Unknown: Target viral genome RNA sequence
aucucacauagcaaucuuuaau

SEQ ID NO: 8843 - RNA, 22 nt, Unknown
  Description of Unknown: Target viral genome RNA sequence
aaucucacauagcaaucuuuaa

SEQ ID NO: 8844 - RNA, 22 nt, Unknown
  Description of Unknown: Target viral genome RNA sequence
uaaucucacauagcaaucuuua

SEQ ID NO: 8845 - RNA, 22 nt, Unknown
  Description of Unknown: Target viral genome RNA sequence
uuaaucucacauagcaaucuuu

SEQ ID NO: 8846 - RNA, 22 nt, Unknown
  Description of Unknown: Target viral genome RNA sequence
aaggaaggaaguucuguugaau

SEQ ID NO: 8847 - RNA, 22 nt, Unknown
  Description of Unknown: Target viral genome RNA sequence
aggaaggaaguucuguugaauu

SEQ ID NO: 8848 - RNA, 22 nt, Unknown
  Description of Unknown: Target viral genome RNA sequence
uaaggaaggaaguucuguugaa

SEQ ID NO: 8849 - RNA, 22 nt, Unknown
  Description of Unknown: Target viral genome RNA sequence
cuuuaaggaaggaaguucuguu

SEQ ID NO: 8850 - RNA, 22 nt, Unknown
  Description of Unknown: Target viral genome RNA sequence
uuuaaggaaggaaguucuguug

SEQ ID NO: 8851 - RNA, 22 nt, Unknown
  Description of Unknown: Target viral genome RNA sequence
uucuuuaaggaaggaaguucug

SEQ ID NO: 8852 - RNA, 22 nt, Unknown
  Description of Unknown: Target viral genome RNA sequence
ucuuuaaggaaggaaguucugu

SEQ ID NO: 8853 - RNA, 22 nt, Unknown
  Description of Unknown: Target viral genome RNA sequence
ggaaggaaguucuguugaauua

SEQ ID NO: 8854 - RNA, 22 nt, Unknown
  Description of Unknown: Target viral genome RNA sequence
gaaggaaguucuguugaauuaa

SEQ ID NO: 8855 - RNA, 22 nt, Unknown
  Description of Unknown: Target viral genome RNA sequence
uuugcuuuugcuuguccugacg

SEQ ID NO: 8856 - RNA, 22 nt, Unknown
  Description of Unknown: Target viral genome RNA sequence
uugcuuuugcuuguccugacgg

SEQ ID NO: 8857 - RNA, 22 nt, Unknown
  Description of Unknown: Target viral genome RNA sequence
gcgguucacuauauguuaaacc

SEQ ID NO: 8858 - RNA, 22 nt, Unknown
  Description of Unknown: Target viral genome RNA sequence
cgguucacuauauguuaaacca

SEQ ID NO: 8859 - RNA, 22 nt, Unknown
  Description of Unknown: Target viral genome RNA sequence
auguguggcgguucacuauaug

SEQ ID NO: 8860 - RNA, 22 nt, Unknown
  Description of Unknown: Target viral genome RNA sequence
uguguggcgguucacuauaugu

SEQ ID NO: 8861 - RNA, 22 nt, Unknown
  Description of Unknown: Target viral genome RNA sequence
guguggcgguucacuauauguu

SEQ ID NO: 8862 - RNA, 22 nt, Unknown
  Description of Unknown: Target viral genome RNA sequence
uguggcgguucacuauauguua

SEQ ID NO: 8863 - RNA, 22 nt, Unknown
  Description of Unknown: Target viral genome RNA sequence
guggcgguucacuauauguuaa

SEQ ID NO: 8864 - RNA, 22 nt, Unknown
  Description of Unknown: Target viral genome RNA sequence
uggcgguucacuauauguuaaa

SEQ ID NO: 8865 - RNA, 22 nt, Unknown
  Description of Unknown: Target viral genome RNA sequence
ggcgguucacuauauguuaaac

SEQ ID NO: 8866 - RNA, 22 nt, Unknown
  Description of Unknown: Target viral genome RNA sequence
uaacaacuaaacgaacaauguu

SEQ ID NO: 8867 - RNA, 22 nt, Unknown
  Description of Unknown: Target viral genome RNA sequence
aacaacuaaacgaacaauguuu

SEQ ID NO: 8868 - RNA, 22 nt, Unknown
  Description of Unknown: Target viral genome RNA sequence
uugccuauagauaaauguagua

SEQ ID NO: 8869 - RNA, 22 nt, Unknown
  Description of Unknown: Target viral genome RNA sequence
uuugccuauagauaaauguagu

SEQ ID NO: 8870 - RNA, 22 nt, Unknown
  Description of Unknown: Target viral genome RNA sequence
aaauauuugccuauagauaaau

SEQ ID NO: 8871 - RNA, 22 nt, Unknown
  Description of Unknown: Target viral genome RNA sequence
auauuugccuauagauaaaugu

SEQ ID NO: 8872 - RNA, 22 nt, Unknown
  Description of Unknown: Target viral genome RNA sequence
auuugccuauagauaaauguag

SEQ ID NO: 8873 - RNA, 22 nt, Unknown
  Description of Unknown: Target viral genome RNA sequence
acuagugcuaugcagacaaugc

SEQ ID NO: 8874 - RNA, 22 nt, Unknown
  Description of Unknown: Target viral genome RNA sequence
cuagugcuaugcagacaaugcu

SEQ ID NO: 8875 - RNA, 22 nt, Unknown
  Description of Unknown: Target viral genome RNA sequence
ugggugaugcguauuaugacau

SEQ ID NO: 8876 - RNA, 22 nt, Unknown
  Description of Unknown: Target viral genome RNA sequence
gguacguuaauaguuaauagcg

SEQ ID NO: 8877 - RNA, 22 nt, Unknown
  Description of Unknown: Target viral genome RNA sequence
agguacguuaauaguuaauagc

SEQ ID NO: 8878 - RNA, 22 nt, Unknown
  Description of Unknown: Target viral genome RNA sequence
gagacagguacguuaauaguua

SEQ ID NO: 8879 - RNA, 22 nt, Unknown
  Description of Unknown: Target viral genome RNA sequence
agagacagguacguuaauaguu

SEQ ID NO: 8880 - RNA, 22 nt, Unknown
  Description of Unknown: Target viral genome RNA sequence
aagagacagguacguuaauagu

SEQ ID NO: 8881 - RNA, 22 nt, Unknown
  Description of Unknown: Target viral genome RNA sequence
gaagagacagguacguuaauag

SEQ ID NO: 8882 - RNA, 22 nt, Unknown
  Description of Unknown: Target viral genome RNA sequence
cagguacguuaauaguuaauag

SEQ ID NO: 8883 - RNA, 22 nt, Unknown
  Description of Unknown: Target viral genome RNA sequence
acagguacguuaauaguuaaua

SEQ ID NO: 8884 - RNA, 22 nt, Unknown
  Description of Unknown: Target viral genome RNA sequence
gacagguacguuaauaguuaau

SEQ ID NO: 8885 - RNA, 22 nt, Unknown
  Description of Unknown: Target viral genome RNA sequence
agacagguacguuaauaguuaa

SEQ ID NO: 8886 - RNA, 22 nt, Unknown
  Description of Unknown: Target viral genome RNA sequence
caagccucuucucguuccucau

SEQ ID NO: 8887 - RNA, 22 nt, Unknown
  Description of Unknown: Target viral genome RNA sequence
aagccucuucucguuccucauc

SEQ ID NO: 8888 - RNA, 22 nt, Unknown
  Description of Unknown: Target viral genome RNA sequence
agccucuucucguuccucauca

SEQ ID NO: 8889 - RNA, 22 nt, Unknown
  Description of Unknown: Target viral genome RNA sequence
gccucuucucguuccucaucac

SEQ ID NO: 8890 - RNA, 22 nt, Unknown
  Description of Unknown: Target viral genome RNA sequence
ccucuucucguuccucaucacg

SEQ ID NO: 8891 - RNA, 22 nt, Unknown
  Description of Unknown: Target viral genome RNA sequence
cucuucucguuccucaucacgu

SEQ ID NO: 8892 - RNA, 22 nt, Unknown
  Description of Unknown: Target viral genome RNA sequence
ucuucucguuccucaucacgua

SEQ ID NO: 8893 - RNA, 22 nt, Unknown
  Description of Unknown: Target viral genome RNA sequence
cuucucguuccucaucacguag

SEQ ID NO: 8894 - RNA, 22 nt, Unknown
  Description of Unknown: Target viral genome RNA sequence
uucucguuccucaucacguagu

SEQ ID NO: 8895 - RNA, 22 nt, Unknown
  Description of Unknown: Target viral genome RNA sequence
ucucguuccucaucacguaguc

SEQ ID NO: 8896 - RNA, 22 nt, Unknown
  Description of Unknown: Target viral genome RNA sequence
ggcagacgugguccagaacaaa

SEQ ID NO: 8897 - RNA, 22 nt, Unknown
  Description of Unknown: Target viral genome RNA sequence
cauucuuggaaugcugaucuuu

SEQ ID NO: 8898 - RNA, 22 nt, Unknown
  Description of Unknown: Target viral genome RNA sequence
cguuuauggagauuuuagucau

SEQ ID NO: 8899 - RNA, 22 nt, Unknown
  Description of Unknown: Target viral genome RNA sequence
aucguuuauggagauuuuaguc

SEQ ID NO: 8900 - RNA, 22 nt, Unknown
  Description of Unknown: Target viral genome RNA sequence
ucguuuauggagauuuuaguca

SEQ ID NO: 8901 - RNA, 22 nt, Unknown
  Description of Unknown: Target viral genome RNA sequence
gaacauaucguuuauggagauu

SEQ ID NO: 8902 - RNA, 22 nt, Unknown
  Description of Unknown: Target viral genome RNA sequence
aacauaucguuuauggagauuu

SEQ ID NO: 8903 - RNA, 22 nt, Unknown
  Description of Unknown: Target viral genome RNA sequence
aucagcugguuuuccauuuaau

SEQ ID NO: 8904 - RNA, 22 nt, Unknown
  Description of Unknown: Target viral genome RNA sequence
aaucagcugguuuuccauuuaa

SEQ ID NO: 8905 - RNA, 22 nt, Unknown
  Description of Unknown: Target viral genome RNA sequence
aaaucagcugguuuuccauuua

SEQ ID NO: 8906 - RNA, 22 nt, Unknown
  Description of Unknown: Target viral genome RNA sequence
cugcuugucgauucagaucuua

SEQ ID NO: 8907 - RNA, 22 nt, Unknown
  Description of Unknown: Target viral genome RNA sequence
cugaguuuuaugaggcuaugua

SEQ ID NO: 8908 - RNA, 22 nt, Unknown
  Description of Unknown: Target viral genome RNA sequence
ugaguuuuaugaggcuauguac

SEQ ID NO: 8909 - RNA, 22 nt, Unknown
  Description of Unknown: Target viral genome RNA sequence
accugaguuuuaugaggcuaug

SEQ ID NO: 8910 - RNA, 22 nt, Unknown
  Description of Unknown: Target viral genome RNA sequence
ccugaguuuuaugaggcuaugu

SEQ ID NO: 8911 - RNA, 22 nt, Unknown
  Description of Unknown: Target viral genome RNA sequence
gaaccugaguuuuaugaggcua

SEQ ID NO: 8912 - RNA, 22 nt, Unknown
  Description of Unknown: Target viral genome RNA sequence
aaccugaguuuuaugaggcuau

SEQ ID NO: 8913 - RNA, 22 nt, Unknown
  Description of Unknown: Target viral genome RNA sequence
gggaaccugaguuuuaugaggc

SEQ ID NO: 8914 - RNA, 22 nt, Unknown
  Description of Unknown: Target viral genome RNA sequence
uugggaaccugaguuuuaugag

SEQ ID NO: 8915 - RNA, 22 nt, Unknown
  Description of Unknown: Target viral genome RNA sequence
ugggaaccugaguuuuaugagg

SEQ ID NO: 8916 - RNA, 22 nt, Unknown
  Description of Unknown: Target viral genome RNA sequence
auggaagagcccuaauguguaa

SEQ ID NO: 8917 - RNA, 22 nt, Unknown
  Description of Unknown: Target viral genome RNA sequence
uggaagagcccuaauguguaaa

SEQ ID NO: 8918 - RNA, 22 nt, Unknown
  Description of Unknown: Target viral genome RNA sequence
auauggaagagcccuaaugugu

SEQ ID NO: 8919 - RNA, 22 nt, Unknown
  Description of Unknown: Target viral genome RNA sequence
uauggaagagcccuaaugugua

SEQ ID NO: 8920 - RNA, 22 nt, Unknown
  Description of Unknown: Target viral genome RNA sequence
cauuacacauaaacgaacuuau

SEQ ID NO: 8921 - RNA, 22 nt, Unknown
  Description of Unknown: Target viral genome RNA sequence
auuacacauaaacgaacuuaug

SEQ ID NO: 8922 - RNA, 22 nt, Unknown
  Description of Unknown: Target viral genome RNA sequence
uacauuacacauaaacgaacuu

SEQ ID NO: 8923 - RNA, 22 nt, Unknown
  Description of Unknown: Target viral genome RNA sequence
acauuacacauaaacgaacuua

SEQ ID NO: 8924 - RNA, 22 nt, Unknown
  Description of Unknown: Target viral genome RNA sequence
uuacacauaaacgaacuuaugg

SEQ ID NO: 8925 - RNA, 22 nt, Unknown
  Description of Unknown: Target viral genome RNA sequence
uacacauaaacgaacuuaugga

SEQ ID NO: 8926 - RNA, 22 nt, Unknown
  Description of Unknown: Target viral genome RNA sequence
guacucauucguuucggaagag

SEQ ID NO: 8927 - RNA, 22 nt, Unknown
  Description of Unknown: Target viral genome RNA sequence
uacucauucguuucggaagaga

SEQ ID NO: 8928 - RNA, 22 nt, Unknown
  Description of Unknown: Target viral genome RNA sequence
auguacucauucguuucggaag

SEQ ID NO: 8929 - RNA, 22 nt, Unknown
  Description of Unknown: Target viral genome RNA sequence
uguacucauucguuucggaaga

SEQ ID NO: 8930 - RNA, 22 nt, Unknown
  Description of Unknown: Target viral genome RNA sequence
uuauguacucauucguuucgga

SEQ ID NO: 8931 - RNA, 22 nt, Unknown
  Description of Unknown: Target viral genome RNA sequence
uauguacucauucguuucggaa

SEQ ID NO: 8932 - RNA, 22 nt, Unknown
  Description of Unknown: Target viral genome RNA sequence
ucauucguuucggaagagacag

SEQ ID NO: 8933 - RNA, 22 nt, Unknown
  Description of Unknown: Target viral genome RNA sequence
cauucguuucggaagagacagg

SEQ ID NO: 8934 - RNA, 22 nt, Unknown
  Description of Unknown: Target viral genome RNA sequence
guacauuuauuagugaugaagu

SEQ ID NO: 8935 - RNA, 22 nt, Unknown
  Description of Unknown: Target viral genome RNA sequence
aguacauuuauuagugaugaag

SEQ ID NO: 8936 - RNA, 22 nt, Unknown
  Description of Unknown: Target viral genome RNA sequence
acauuuauuagugaugaaguug

SEQ ID NO: 8937 - RNA, 22 nt, Unknown
  Description of Unknown: Target viral genome RNA sequence
uacauuuauuagugaugaaguu

SEQ ID NO: 8938 - RNA, 22 nt, Unknown
  Description of Unknown: Target viral genome RNA sequence
cauuuauuagugaugaaguugc

SEQ ID NO: 8939 - RNA, 22 nt, Unknown
  Description of Unknown: Target viral genome RNA sequence
uugucuuguaggcuugaugugg

SEQ ID NO: 8940 - RNA, 22 nt, Unknown
  Description of Unknown: Target viral genome RNA sequence
cuugucuuguaggcuugaugug

SEQ ID NO: 8941 - RNA, 22 nt, Unknown
  Description of Unknown: Target viral genome RNA sequence
gucuuguaggcuugauguggcu

SEQ ID NO: 8942 - RNA, 22 nt, Unknown
  Description of Unknown: Target viral genome RNA sequence
ugucuuguaggcuugauguggc

SEQ ID NO: 8943 - RNA, 22 nt, Unknown
  Description of Unknown: Target viral genome RNA sequence
uguaggcuugauguggcucagc

SEQ ID NO: 8944 - RNA, 22 nt, Unknown
  Description of Unknown: Target viral genome RNA sequence
uuguaggcuugauguggcucag

SEQ ID NO: 8945 - RNA, 22 nt, Unknown
  Description of Unknown: Target viral genome RNA sequence
uaggcuugauguggcucagcua

SEQ ID NO: 8946 - RNA, 22 nt, Unknown
  Description of Unknown: Target viral genome RNA sequence
guaggcuugauguggcucagcu

SEQ ID NO: 8947 - RNA, 22 nt, Unknown
  Description of Unknown: Target viral genome RNA sequence
uguguugacauaccuggcauac

SEQ ID NO: 8948 - RNA, 22 nt, Unknown
  Description of Unknown: Target viral genome RNA sequence
auguguugacauaccuggcaua

SEQ ID NO: 8949 - RNA, 22 nt, Unknown
  Description of Unknown: Target viral genome RNA sequence
uauguguugacauaccuggcau

SEQ ID NO: 8950 - RNA, 22 nt, Unknown
  Description of Unknown: Target viral genome RNA sequence
uuauguguugacauaccuggca

SEQ ID NO: 8951 - RNA, 22 nt, Unknown
  Description of Unknown: Target viral genome RNA sequence
guguugacauaccuggcauacc

SEQ ID NO: 8952 - RNA, 22 nt, Unknown
  Description of Unknown: Target viral genome RNA sequence
gugauaucagacaacuacuauu

SEQ ID NO: 8953 - RNA, 22 nt, Unknown
  Description of Unknown: Target viral genome RNA sequence
acacugugagugcuuugguuua

SEQ ID NO: 8954 - RNA, 22 nt, Unknown
  Description of Unknown: Target viral genome RNA sequence
aauuguugacacugugagugcu

SEQ ID NO: 8955 - RNA, 22 nt, Unknown
  Description of Unknown: Target viral genome RNA sequence
aaauuguugacacugugagugc

SEQ ID NO: 8956 - RNA, 22 nt, Unknown
  Description of Unknown: Target viral genome RNA sequence
uuguugacacugugagugcuuu

SEQ ID NO: 8957 - RNA, 22 nt, Unknown
  Description of Unknown: Target viral genome RNA sequence
auuguugacacugugagugcuu

SEQ ID NO: 8958 - RNA, 22 nt, Unknown
  Description of Unknown: Target viral genome RNA sequence
guugacacugugagugcuuugg

SEQ ID NO: 8959 - RNA, 22 nt, Unknown
  Description of Unknown: Target viral genome RNA sequence
uguugacacugugagugcuuug

SEQ ID NO: 8960 - RNA, 22 nt, Unknown
  Description of Unknown: Target viral genome RNA sequence
ugacacugugagugcuuugguu

SEQ ID NO: 8961 - RNA, 22 nt, Unknown
  Description of Unknown: Target viral genome RNA sequence
uugacacugugagugcuuuggu

SEQ ID NO: 8962 - RNA, 22 nt, Unknown
  Description of Unknown: Target viral genome RNA sequence
guugugaugucacagaugugac

SEQ ID NO: 8963 - RNA, 22 nt, Unknown
  Description of Unknown: Target viral genome RNA sequence
gguugugaugucacagauguga

SEQ ID NO: 8964 - RNA, 22 nt, Unknown
  Description of Unknown: Target viral genome RNA sequence
agguugugaugucacagaugug

SEQ ID NO: 8965 - RNA, 22 nt, Unknown
  Description of Unknown: Target viral genome RNA sequence
uuuaauauggucuauaugccug

SEQ ID NO: 8966 - RNA, 22 nt, Unknown
  Description of Unknown: Target viral genome RNA sequence
uuaauauggucuauaugccugc

SEQ ID NO: 8967 - RNA, 22 nt, Unknown
  Description of Unknown: Target viral genome RNA sequence
uaauauggucuauaugccugcu

SEQ ID NO: 8968 - RNA, 22 nt, Unknown
  Description of Unknown: Target viral genome RNA sequence
auauggucuauaugccugcuag

SEQ ID NO: 8969 - RNA, 22 nt, Unknown
  Description of Unknown: Target viral genome RNA sequence
augacugacauagccaagaaac

SEQ ID NO: 8970 - RNA, 22 nt, Unknown
  Description of Unknown: Target viral genome RNA sequence
ugacugacauagccaagaaacc

SEQ ID NO: 8971 - RNA, 22 nt, Unknown
  Description of Unknown: Target viral genome RNA sequence
guaccgucugcgguauguggaa

SEQ ID NO: 8972 - RNA, 22 nt, Unknown
  Description of Unknown: Target viral genome RNA sequence
agucuguaccgucugcgguaug

SEQ ID NO: 8973 - RNA, 22 nt, Unknown
  Description of Unknown: Target viral genome RNA sequence
cacugugagugcuuugguuuau

SEQ ID NO: 8974 - RNA, 22 nt, Unknown
  Description of Unknown: Target viral genome RNA sequence
cugugagugcuuugguuuauga

SEQ ID NO: 8975 - RNA, 22 nt, Unknown
  Description of Unknown: Target viral genome RNA sequence
aaggcauucaguacggucguag

SEQ ID NO: 8976 - RNA, 22 nt, Unknown
  Description of Unknown: Target viral genome RNA sequence
gaaggcauucaguacggucgua

SEQ ID NO: 8977 - RNA, 22 nt, Unknown
  Description of Unknown: Target viral genome RNA sequence
ggcauucaguacggucguagug

SEQ ID NO: 8978 - RNA, 22 nt, Unknown
  Description of Unknown: Target viral genome RNA sequence
aagaacuuuaagucaguucuuu

SEQ ID NO: 8979 - RNA, 22 nt, Unknown
  Description of Unknown: Target viral genome RNA sequence
gaacuuuaagucaguucuuuau

SEQ ID NO: 8980 - RNA, 22 nt, Unknown
  Description of Unknown: Target viral genome RNA sequence
agaacuuuaagucaguucuuua

SEQ ID NO: 8981 - RNA, 22 nt, Unknown
  Description of Unknown: Target viral genome RNA sequence
acuuuaagucaguucuuuauua

SEQ ID NO: 8982 - RNA, 22 nt, Unknown
  Description of Unknown: Target viral genome RNA sequence
aacuuuaagucaguucuuuauu

SEQ ID NO: 8983 - RNA, 22 nt, Unknown
  Description of Unknown: Target viral genome RNA sequence
uuggugcugguucugauaaagg

SEQ ID NO: 8984 - RNA, 22 nt, Unknown
  Description of Unknown: Target viral genome RNA sequence
gucuuacuaaauacacaauggc

SEQ ID NO: 8985 - RNA, 22 nt, Unknown
  Description of Unknown: Target viral genome RNA sequence
cgucuuacuaaauacacaaugg

SEQ ID NO: 8986 - RNA, 22 nt, Unknown
  Description of Unknown: Target viral genome RNA sequence
aaaugugauagagccaugccua

SEQ ID NO: 8987 - RNA, 22 nt, Unknown
  Description of Unknown: Target viral genome RNA sequence
cuauauggaagagcccuaaugu

SEQ ID NO: 8988 - RNA, 22 nt, Unknown
  Description of Unknown: Target viral genome RNA sequence
aaacgcacuacgugcuuuucag

SEQ ID NO: 8989 - RNA, 22 nt, Unknown
  Description of Unknown: Target viral genome RNA sequence
uaaacgcacuacgugcuuuuca

SEQ ID NO: 8990 - RNA, 22 nt, Unknown
  Description of Unknown: Target viral genome RNA sequence
cuagauaaacgcacuacgugcu

SEQ ID NO: 8991 - RNA, 22 nt, Unknown
  Description of Unknown: Target viral genome RNA sequence
agauaaacgcacuacgugcuuu

SEQ ID NO: 8992 - RNA, 22 nt, Unknown
  Description of Unknown: Target viral genome RNA sequence
uagauaaacgcacuacgugcuu

SEQ ID NO: 8993 - RNA, 22 nt, Unknown
  Description of Unknown: Target viral genome RNA sequence
auaaacgcacuacgugcuuuuc

SEQ ID NO: 8994 - RNA, 22 nt, Unknown
  Description of Unknown: Target viral genome RNA sequence
gauaaacgcacuacgugcuuuu

SEQ ID NO: 8995 - RNA, 22 nt, Unknown
  Description of Unknown: Target viral genome RNA sequence
uggaauuugcgagaaaugcuug

SEQ ID NO: 8996 - RNA, 22 nt, Unknown
  Description of Unknown: Target viral genome RNA sequence
ggaauuugcgagaaaugcuugc

SEQ ID NO: 8997 - RNA, 22 nt, Unknown
  Description of Unknown: Target viral genome RNA sequence
auacucaacugugucaauauuu

SEQ ID NO: 8998 - RNA, 22 nt, Unknown
  Description of Unknown: Target viral genome RNA sequence
uauacucaacugugucaauauu

SEQ ID NO: 8999 - RNA, 22 nt, Unknown
  Description of Unknown: Target viral genome RNA sequence
acucaacugugucaauauuuaa

SEQ ID NO: 9000 - RNA, 22 nt, Unknown
  Description of Unknown: Target viral genome RNA sequence
uacucaacugugucaauauuua

SEQ ID NO: 9001 - RNA, 22 nt, Unknown
  Description of Unknown: Target viral genome RNA sequence
cucaacugugucaauauuuaaa

SEQ ID NO: 9002 - RNA, 22 nt, Unknown
  Description of Unknown: Target viral genome RNA sequence
guuucguccguguugcagccga

SEQ ID NO: 9003 - RNA, 22 nt, Unknown
  Description of Unknown: Target viral genome RNA sequence
uuucguccguguugcagccgau

SEQ ID NO: 9004 - RNA, 22 nt, Unknown
  Description of Unknown: Target viral genome RNA sequence
cgguuucguccguguugcagcc

SEQ ID NO: 9005 - RNA, 22 nt, Unknown
  Description of Unknown: Target viral genome RNA sequence
gguuucguccguguugcagccg

SEQ ID NO: 9006 - RNA, 22 nt, Unknown
  Description of Unknown: Target viral genome RNA sequence
uacgguuucguccguguugcag

SEQ ID NO: 9007 - RNA, 22 nt, Unknown
  Description of Unknown: Target viral genome RNA sequence
acgguuucguccguguugcagc

SEQ ID NO: 9008 - RNA, 22 nt, Unknown
  Description of Unknown: Target viral genome RNA sequence
cuuacgguuucguccguguugc

SEQ ID NO: 9009 - RNA, 22 nt, Unknown
  Description of Unknown: Target viral genome RNA sequence
uuacgguuucguccguguugca

SEQ ID NO: 9010 - RNA, 22 nt, Unknown
  Description of Unknown: Target viral genome RNA sequence
uucguccguguugcagccgauc

SEQ ID NO: 9011 - RNA, 22 nt, Unknown
  Description of Unknown: Target viral genome RNA sequence
ucguccguguugcagccgauca

SEQ ID NO: 9012 - RNA, 22 nt, Unknown
  Description of Unknown: Target viral genome RNA sequence
uacagaguaguaguacuuucuu

SEQ ID NO: 9013 - RNA, 22 nt, Unknown
  Description of Unknown: Target viral genome RNA sequence
gcuguuuugcagagugguuuua

SEQ ID NO: 9014 - RNA, 22 nt, Unknown
  Description of Unknown: Target viral genome RNA sequence
cuguuuugcagagugguuuuag

SEQ ID NO: 9015 - RNA, 22 nt, Unknown
  Description of Unknown: Target viral genome RNA sequence
aaguuuuggaccacuagugaga

SEQ ID NO: 9016 - RNA, 22 nt, Unknown
  Description of Unknown: Target viral genome RNA sequence
aaauauuuguugaugguguucc

SEQ ID NO: 9017 - RNA, 22 nt, Unknown
  Description of Unknown: Target viral genome RNA sequence
guacuaugaccaauagacaguu

SEQ ID NO: 9018 - RNA, 22 nt, Unknown
  Description of Unknown: Target viral genome RNA sequence
aguacuaugaccaauagacagu

SEQ ID NO: 9019 - RNA, 22 nt, Unknown
  Description of Unknown: Target viral genome RNA sequence
acuaugaccaauagacaguuuc

SEQ ID NO: 9020 - RNA, 22 nt, Unknown
  Description of Unknown: Target viral genome RNA sequence
uacuaugaccaauagacaguuu

SEQ ID NO: 9021 - RNA, 22 nt, Unknown
  Description of Unknown: Target viral genome RNA sequence
uaugaccaauagacaguuucau

SEQ ID NO: 9022 - RNA, 22 nt, Unknown
  Description of Unknown: Target viral genome RNA sequence
cuaugaccaauagacaguuuca

SEQ ID NO: 9023 - RNA, 22 nt, Unknown
  Description of Unknown: Target viral genome RNA sequence
ugaccaauagacaguuucauca

SEQ ID NO: 9024 - RNA, 22 nt, Unknown
  Description of Unknown: Target viral genome RNA sequence
augaccaauagacaguuucauc

SEQ ID NO: 9025 - RNA, 22 nt, Unknown
  Description of Unknown: Target viral genome RNA sequence
aacacagucuguaccgucugcg

SEQ ID NO: 9026 - RNA, 22 nt, Unknown
  Description of Unknown: Target viral genome RNA sequence
aaacacagucuguaccgucugc

SEQ ID NO: 9027 - RNA, 22 nt, Unknown
  Description of Unknown: Target viral genome RNA sequence
gacccuguggguuuuacacuua

SEQ ID NO: 9028 - RNA, 22 nt, Unknown
  Description of Unknown: Target viral genome RNA sequence
ugacccuguggguuuuacacuu

SEQ ID NO: 9029 - RNA, 22 nt, Unknown
  Description of Unknown: Target viral genome RNA sequence
augacccuguggguuuuacacu

SEQ ID NO: 9030 - RNA, 22 nt, Unknown
  Description of Unknown: Target viral genome RNA sequence
aaugacccuguggguuuuacac

SEQ ID NO: 9031 - RNA, 22 nt, Unknown
  Description of Unknown: Target viral genome RNA sequence
cacagucuguaccgucugcggu

SEQ ID NO: 9032 - RNA, 22 nt, Unknown
  Description of Unknown: Target viral genome RNA sequence
acacagucuguaccgucugcgg

SEQ ID NO: 9033 - RNA, 22 nt, Unknown
  Description of Unknown: Target viral genome RNA sequence
auauagucuacucuugugcaga

SEQ ID NO: 9034 - RNA, 22 nt, Unknown
  Description of Unknown: Target viral genome RNA sequence
uauauagucuacucuugugcag

SEQ ID NO: 9035 - RNA, 22 nt, Unknown
  Description of Unknown: Target viral genome RNA sequence
auauauagucuacucuugugca

SEQ ID NO: 9036 - RNA, 22 nt, Unknown
  Description of Unknown: Target viral genome RNA sequence
gauauauagucuacucuugugc

SEQ ID NO: 9037 - RNA, 22 nt, Unknown
  Description of Unknown: Target viral genome RNA sequence
cgauauauagucuacucuugug

SEQ ID NO: 9038 - RNA, 22 nt, Unknown
  Description of Unknown: Target viral genome RNA sequence
uacgauauauagucuacucuug

SEQ ID NO: 9039 - RNA, 22 nt, Unknown
  Description of Unknown: Target viral genome RNA sequence
uuacgauauauagucuacucuu

SEQ ID NO: 9040 - RNA, 22 nt, Unknown
  Description of Unknown: Target viral genome RNA sequence
uuuacgauauauagucuacucu

SEQ ID NO: 9041 - RNA, 22 nt, Unknown
  Description of Unknown: Target viral genome RNA sequence
guuuacgauauauagucuacuc

SEQ ID NO: 9042 - RNA, 22 nt, Unknown
  Description of Unknown: Target viral genome RNA sequence
auuggccgcaaauugcacaauu

SEQ ID NO: 9043 - RNA, 22 nt, Unknown
  Description of Unknown: Target viral genome RNA sequence
cauuggccgcaaauugcacaau

SEQ ID NO: 9044 - RNA, 22 nt, Unknown
  Description of Unknown: Target viral genome RNA sequence
uggccgcaaauugcacaauuug

SEQ ID NO: 9045 - RNA, 22 nt, Unknown
  Description of Unknown: Target viral genome RNA sequence
uuggccgcaaauugcacaauuu

SEQ ID NO: 9046 - RNA, 22 nt, Unknown
  Description of Unknown: Target viral genome RNA sequence
aaacauuggccgcaaauugcac

SEQ ID NO: 9047 - RNA, 22 nt, Unknown
  Description of Unknown: Target viral genome RNA sequence
caaacauuggccgcaaauugca

SEQ ID NO: 9048 - RNA, 22 nt, Unknown
  Description of Unknown: Target viral genome RNA sequence
acauuggccgcaaauugcacaa

SEQ ID NO: 9049 - RNA, 22 nt, Unknown
  Description of Unknown: Target viral genome RNA sequence
aacauuggccgcaaauugcaca

SEQ ID NO: 9050 - RNA, 22 nt, Unknown
  Description of Unknown: Target viral genome RNA sequence
gccgcaaauugcacaauuugcc

SEQ ID NO: 9051 - RNA, 22 nt, Unknown
  Description of Unknown: Target viral genome RNA sequence
ggccgcaaauugcacaauuugc

SEQ ID NO: 9052 - RNA, 22 nt, Unknown
  Description of Unknown: Target viral genome RNA sequence
cgguacuauuaccguugaagag

SEQ ID NO: 9053 - RNA, 22 nt, Unknown
  Description of Unknown: Target viral genome RNA sequence
gucuuuacugguuaucguguaa

SEQ ID NO: 9054 - RNA, 22 nt, Unknown
  Description of Unknown: Target viral genome RNA sequence
ucuuuacugguuaucguguaac

SEQ ID NO: 9055 - RNA, 22 nt, Unknown
  Description of Unknown: Target viral genome RNA sequence
augucuuuacugguuaucgugu

SEQ ID NO: 9056 - RNA, 22 nt, Unknown
  Description of Unknown: Target viral genome RNA sequence
ugucuuuacugguuaucgugua

SEQ ID NO: 9057 - RNA, 22 nt, Unknown
  Description of Unknown: Target viral genome RNA sequence
uuacugguuaucguguaacuaa

SEQ ID NO: 9058 - RNA, 22 nt, Unknown
  Description of Unknown: Target viral genome RNA sequence
uacugguuaucguguaacuaaa

SEQ ID NO: 9059 - RNA, 22 nt, Unknown
  Description of Unknown: Target viral genome RNA sequence
cuuuacugguuaucguguaacu

SEQ ID NO: 9060 - RNA, 22 nt, Unknown
  Description of Unknown: Target viral genome RNA sequence
uuuacugguuaucguguaacua

SEQ ID NO: 9061 - RNA, 22 nt, Unknown
  Description of Unknown: Target viral genome RNA sequence
auggugauucugaaguuguucu

SEQ ID NO: 9062 - RNA, 22 nt, Unknown
  Description of Unknown: Target viral genome RNA sequence
uaauggugauucugaaguuguu

SEQ ID NO: 9063 - RNA, 22 nt, Unknown
  Description of Unknown: Target viral genome RNA sequence
cuaauggugauucugaaguugu

SEQ ID NO: 9064 - RNA, 22 nt, Unknown
  Description of Unknown: Target viral genome RNA sequence
gcuaauggugauucugaaguug

SEQ ID NO: 9065 - RNA, 22 nt, Unknown
  Description of Unknown: Target viral genome RNA sequence
uugcuaauggugauucugaagu

SEQ ID NO: 9066 - RNA, 22 nt, Unknown
  Description of Unknown: Target viral genome RNA sequence
caugcauuccacacaccagcuu

SEQ ID NO: 9067 - RNA, 22 nt, Unknown
  Description of Unknown: Target viral genome RNA sequence
augcauuccacacaccagcuuu

SEQ ID NO: 9068 - RNA, 22 nt, Unknown
  Description of Unknown: Target viral genome RNA sequence
aaauuagucuugucuguuaauc

SEQ ID NO: 9069 - RNA, 22 nt, Unknown
  Description of Unknown: Target viral genome RNA sequence
guuuuccauugugugcuaaugg

SEQ ID NO: 9070 - RNA, 22 nt, Unknown
  Description of Unknown: Target viral genome RNA sequence
uuacaaacuugugcccuuuugg

SEQ ID NO: 9071 - RNA, 22 nt, Unknown
  Description of Unknown: Target viral genome RNA sequence
uauuacaaacuugugcccuuuu

SEQ ID NO: 9072 - RNA, 22 nt, Unknown
  Description of Unknown: Target viral genome RNA sequence
auuacaaacuugugcccuuuug

SEQ ID NO: 9073 - RNA, 22 nt, Unknown
  Description of Unknown: Target viral genome RNA sequence
gggcacacuagaaccagaauau

SEQ ID NO: 9074 - RNA, 22 nt, Unknown
  Description of Unknown: Target viral genome RNA sequence
agggcacacuagaaccagaaua

SEQ ID NO: 9075 - RNA, 22 nt, Unknown
  Description of Unknown: Target viral genome RNA sequence
gcacacuagaaccagaauauuu

SEQ ID NO: 9076 - RNA, 22 nt, Unknown
  Description of Unknown: Target viral genome RNA sequence
ggcacacuagaaccagaauauu

SEQ ID NO: 9077 - RNA, 22 nt, Unknown
  Description of Unknown: Target viral genome RNA sequence
acacuagaaccagaauauuuca

SEQ ID NO: 9078 - RNA, 22 nt, Unknown
  Description of Unknown: Target viral genome RNA sequence
cacacuagaaccagaauauuuc

SEQ ID NO: 9079 - RNA, 22 nt, Unknown
  Description of Unknown: Target viral genome RNA sequence
acuagaaccagaauauuucaau

SEQ ID NO: 9080 - RNA, 22 nt, Unknown
  Description of Unknown: Target viral genome RNA sequence
cacuagaaccagaauauuucaa

SEQ ID NO: 9081 - RNA, 22 nt, Unknown
  Description of Unknown: Target viral genome RNA sequence
uagaaccagaauauuucaauuc

SEQ ID NO: 9082 - RNA, 22 nt, Unknown
  Description of Unknown: Target viral genome RNA sequence
cuagaaccagaauauuucaauu

SEQ ID NO: 9083 - RNA, 22 nt, Unknown
  Description of Unknown: Target viral genome RNA sequence
uggaauguagugcguauaaaga

SEQ ID NO: 9084 - RNA, 22 nt, Unknown
  Description of Unknown: Target viral genome RNA sequence
ggaauguagugcguauaaagau

SEQ ID NO: 9085 - RNA, 22 nt, Unknown
  Description of Unknown: Target viral genome RNA sequence
auggacaacaguuugguccaac

SEQ ID NO: 9086 - RNA, 22 nt, Unknown
  Description of Unknown: Target viral genome RNA sequence
uauggacaacaguuugguccaa

SEQ ID NO: 9087 - RNA, 22 nt, Unknown
  Description of Unknown: Target viral genome RNA sequence
ugacauauggacaacaguuugg

SEQ ID NO: 9088 - RNA, 22 nt, Unknown
  Description of Unknown: Target viral genome RNA sequence
augacauauggacaacaguuug

SEQ ID NO: 9089 - RNA, 22 nt, Unknown
  Description of Unknown: Target viral genome RNA sequence
auauggacaacaguuuggucca

SEQ ID NO: 9090 - RNA, 22 nt, Unknown
  Description of Unknown: Target viral genome RNA sequence
cauauggacaacaguuuggucc

SEQ ID NO: 9091 - RNA, 22 nt, Unknown
  Description of Unknown: Target viral genome RNA sequence
acauauggacaacaguuugguc

SEQ ID NO: 9092 - RNA, 22 nt, Unknown
  Description of Unknown: Target viral genome RNA sequence
gacauauggacaacaguuuggu

SEQ ID NO: 9093 - RNA, 22 nt, Unknown
  Description of Unknown: Target viral genome RNA sequence
gcaauauuguuaacgugagucu

SEQ ID NO: 9094 - RNA, 22 nt, Unknown
  Description of Unknown: Target viral genome RNA sequence
aauauuugccuauagauaaaug

SEQ ID NO: 9095 - RNA, 22 nt, Unknown
  Description of Unknown: Target viral genome RNA sequence
cucuauagaaauagagauguug

SEQ ID NO: 9096 - RNA, 22 nt, Unknown
  Description of Unknown: Target viral genome RNA sequence
ucuauagaaauagagauguuga

SEQ ID NO: 9097 - RNA, 22 nt, Unknown
  Description of Unknown: Target viral genome RNA sequence
gugucucuauagaaauagagau

SEQ ID NO: 9098 - RNA, 22 nt, Unknown
  Description of Unknown: Target viral genome RNA sequence
ugucucuauagaaauagagaug

SEQ ID NO: 9099 - RNA, 22 nt, Unknown
  Description of Unknown: Target viral genome RNA sequence
gucucuauagaaauagagaugu

SEQ ID NO: 9100 - RNA, 22 nt, Unknown
  Description of Unknown: Target viral genome RNA sequence
ucucuauagaaauagagauguu

SEQ ID NO: 9101 - RNA, 22 nt, Unknown
  Description of Unknown: Target viral genome RNA sequence
guuuagcugccacaguacgucu

SEQ ID NO: 9102 - RNA, 22 nt, Unknown
  Description of Unknown: Target viral genome RNA sequence
aguuuagcugccacaguacguc

SEQ ID NO: 9103 - RNA, 22 nt, Unknown
  Description of Unknown: Target viral genome RNA sequence
auuucaccuuauaauucacaga

SEQ ID NO: 9104 - RNA, 22 nt, Unknown
  Description of Unknown: Target viral genome RNA sequence
uacugcugcaauauuguuaacg

SEQ ID NO: 9105 - RNA, 22 nt, Unknown
  Description of Unknown: Target viral genome RNA sequence
guacugcugcaauauuguuaac

SEQ ID NO: 9106 - RNA, 22 nt, Unknown
  Description of Unknown: Target viral genome RNA sequence
gcugcaauauuguuaacgugag

SEQ ID NO: 9107 - RNA, 22 nt, Unknown
  Description of Unknown: Target viral genome RNA sequence
ugcugcaauauuguuaacguga

SEQ ID NO: 9108 - RNA, 22 nt, Unknown
  Description of Unknown: Target viral genome RNA sequence
cugcugcaauauuguuaacgug

SEQ ID NO: 9109 - RNA, 22 nt, Unknown
  Description of Unknown: Target viral genome RNA sequence
acugcugcaauauuguuaacgu

SEQ ID NO: 9110 - RNA, 22 nt, Unknown
  Description of Unknown: Target viral genome RNA sequence
auaagggacacuuugauggaca

SEQ ID NO: 9111 - RNA, 22 nt, Unknown
  Description of Unknown: Target viral genome RNA sequence
uuccuuguuuuaauuaugcuua

SEQ ID NO: 9112 - RNA, 22 nt, Unknown
  Description of Unknown: Target viral genome RNA sequence
uccuuguuuuaauuaugcuuau

SEQ ID NO: 9113 - RNA, 22 nt, Unknown
  Description of Unknown: Target viral genome RNA sequence
uauuccuuguuuuaauuaugcu

SEQ ID NO: 9114 - RNA, 22 nt, Unknown
  Description of Unknown: Target viral genome RNA sequence
auuccuuguuuuaauuaugcuu

SEQ ID NO: 9115 - RNA, 22 nt, Unknown
  Description of Unknown: Target viral genome RNA sequence
cuauuccuuguuuuaauuaugc

SEQ ID NO: 9116 - RNA, 22 nt, Unknown
  Description of Unknown: Target viral genome RNA sequence
cugcuauuccuuguuuuaauua

SEQ ID NO: 9117 - RNA, 22 nt, Unknown
  Description of Unknown: Target viral genome RNA sequence
ugcuauuccuuguuuuaauuau

SEQ ID NO: 9118 - RNA, 22 nt, Unknown
  Description of Unknown: Target viral genome RNA sequence
uucugcuauuccuuguuuuaau

SEQ ID NO: 9119 - RNA, 22 nt, Unknown
  Description of Unknown: Target viral genome RNA sequence
ucugcuauuccuuguuuuaauu

SEQ ID NO: 9120 - RNA, 22 nt, Unknown
  Description of Unknown: Target viral genome RNA sequence
acauccuaaucaggaguaugcu

SEQ ID NO: 9121 - RNA, 22 nt, Unknown
  Description of Unknown: Target viral genome RNA sequence
cauccuaaucaggaguaugcug

SEQ ID NO: 9122 - RNA, 22 nt, Unknown
  Description of Unknown: Target viral genome RNA sequence
uacuaaacauccuaaucaggag

SEQ ID NO: 9123 - RNA, 22 nt, Unknown
  Description of Unknown: Target viral genome RNA sequence
acuaaacauccuaaucaggagu

SEQ ID NO: 9124 - RNA, 22 nt, Unknown
  Description of Unknown: Target viral genome RNA sequence
cuuacuaaacauccuaaucagg

SEQ ID NO: 9125 - RNA, 22 nt, Unknown
  Description of Unknown: Target viral genome RNA sequence
uuacuaaacauccuaaucagga

SEQ ID NO: 9126 - RNA, 22 nt, Unknown
  Description of Unknown: Target viral genome RNA sequence
aaacauccuaaucaggaguaug

SEQ ID NO: 9127 - RNA, 22 nt, Unknown
  Description of Unknown: Target viral genome RNA sequence
aacauccuaaucaggaguaugc

SEQ ID NO: 9128 - RNA, 22 nt, Unknown
  Description of Unknown: Target viral genome RNA sequence
cuaaacauccuaaucaggagua

SEQ ID NO: 9129 - RNA, 22 nt, Unknown
  Description of Unknown: Target viral genome RNA sequence
uaaacauccuaaucaggaguau

SEQ ID NO: 9130 - RNA, 22 nt, Unknown
  Description of Unknown: Target viral genome RNA sequence
cacuauguuagaauuacuggcu

SEQ ID NO: 9131 - RNA, 22 nt, Unknown
  Description of Unknown: Target viral genome RNA sequence
acuauguuagaauuacuggcuu

SEQ ID NO: 9132 - RNA, 22 nt, Unknown
  Description of Unknown: Target viral genome RNA sequence
agagcacuauguuagaauuacu

SEQ ID NO: 9133 - RNA, 22 nt, Unknown
  Description of Unknown: Target viral genome RNA sequence
gagcacuauguuagaauuacug

SEQ ID NO: 9134 - RNA, 22 nt, Unknown
  Description of Unknown: Target viral genome RNA sequence
agcacuauguuagaauuacugg

SEQ ID NO: 9135 - RNA, 22 nt, Unknown
  Description of Unknown: Target viral genome RNA sequence
gcacuauguuagaauuacuggc

SEQ ID NO: 9136 - RNA, 22 nt, Unknown
  Description of Unknown: Target viral genome RNA sequence
uuuuggugcugguucugauaaa

SEQ ID NO: 9137 - RNA, 22 nt, Unknown
  Description of Unknown: Target viral genome RNA sequence
uuuggugcugguucugauaaag

SEQ ID NO: 9138 - RNA, 22 nt, Unknown
  Description of Unknown: Target viral genome RNA sequence
acauuuuggugcugguucugau

SEQ ID NO: 9139 - RNA, 22 nt, Unknown
  Description of Unknown: Target viral genome RNA sequence
cauuuuggugcugguucugaua

SEQ ID NO: 9140 - RNA, 22 nt, Unknown
  Description of Unknown: Target viral genome RNA sequence
auuuuggugcugguucugauaa

SEQ ID NO: 9141 - RNA, 22 nt, Unknown
  Description of Unknown: Target viral genome RNA sequence
uuauacauuuuggugcugguuc

SEQ ID NO: 9142 - RNA, 22 nt, Unknown
  Description of Unknown: Target viral genome RNA sequence
uauacauuuuggugcugguucu

SEQ ID NO: 9143 - RNA, 22 nt, Unknown
  Description of Unknown: Target viral genome RNA sequence
auacauuuuggugcugguucug

SEQ ID NO: 9144 - RNA, 22 nt, Unknown
  Description of Unknown: Target viral genome RNA sequence
cuugugcagaaugaauucucgu

SEQ ID NO: 9145 - RNA, 22 nt, Unknown
  Description of Unknown: Target viral genome RNA sequence
uauuuuaaauauugggaucaga

SEQ ID NO: 9146 - RNA, 22 nt, Unknown
  Description of Unknown: Target viral genome RNA sequence
auuuuaaauauugggaucagac

SEQ ID NO: 9147 - RNA, 22 nt, Unknown
  Description of Unknown: Target viral genome RNA sequence
uuuuaaauauugggaucagaca

SEQ ID NO: 9148 - RNA, 22 nt, Unknown
  Description of Unknown: Target viral genome RNA sequence
uuuaaauauugggaucagacau

SEQ ID NO: 9149 - RNA, 22 nt, Unknown
  Description of Unknown: Target viral genome RNA sequence
ccguuauuuuaaauauugggau

SEQ ID NO: 9150 - RNA, 22 nt, Unknown
  Description of Unknown: Target viral genome RNA sequence
cguuauuuuaaauauugggauc

SEQ ID NO: 9151 - RNA, 22 nt, Unknown
  Description of Unknown: Target viral genome RNA sequence
guuauuuuaaauauugggauca

SEQ ID NO: 9152 - RNA, 22 nt, Unknown
  Description of Unknown: Target viral genome RNA sequence
uuauuuuaaauauugggaucag

SEQ ID NO: 9153 - RNA, 22 nt, Unknown
  Description of Unknown: Target viral genome RNA sequence
uuaaauauugggaucagacaua

SEQ ID NO: 9154 - RNA, 22 nt, Unknown
  Description of Unknown: Target viral genome RNA sequence
uaaauauugggaucagacauac

SEQ ID NO: 9155 - RNA, 22 nt, Unknown
  Description of Unknown: Target viral genome RNA sequence
aguaugccauuagugcaaagaa

SEQ ID NO: 9156 - RNA, 22 nt, Unknown
  Description of Unknown: Target viral genome RNA sequence
guaugccauuagugcaaagaau

SEQ ID NO: 9157 - RNA, 22 nt, Unknown
  Description of Unknown: Target viral genome RNA sequence
uaugccauuagugcaaagaaua

SEQ ID NO: 9158 - RNA, 22 nt, Unknown
  Description of Unknown: Target viral genome RNA sequence
augccauuagugcaaagaauag

SEQ ID NO: 9159 - RNA, 22 nt, Unknown
  Description of Unknown: Target viral genome RNA sequence
cuuaaguaugccauuagugcaa

SEQ ID NO: 9160 - RNA, 22 nt, Unknown
  Description of Unknown: Target viral genome RNA sequence
uuaaguaugccauuagugcaaa

SEQ ID NO: 9161 - RNA, 22 nt, Unknown
  Description of Unknown: Target viral genome RNA sequence
uaaguaugccauuagugcaaag

SEQ ID NO: 9162 - RNA, 22 nt, Unknown
  Description of Unknown: Target viral genome RNA sequence
aaguaugccauuagugcaaaga

SEQ ID NO: 9163 - RNA, 22 nt, Unknown
  Description of Unknown: Target viral genome RNA sequence
ugccauuagugcaaagaauaga

SEQ ID NO: 9164 - RNA, 22 nt, Unknown
  Description of Unknown: Target viral genome RNA sequence
gccauuagugcaaagaauagag

SEQ ID NO: 9165 - RNA, 22 nt, Unknown
  Description of Unknown: Target viral genome RNA sequence
uuguguacacacacugguacug

SEQ ID NO: 9166 - RNA, 22 nt, Unknown
  Description of Unknown: Target viral genome RNA sequence
uguguacacacacugguacugg

SEQ ID NO: 9167 - RNA, 22 nt, Unknown
  Description of Unknown: Target viral genome RNA sequence
uguuguguacacacacugguac

SEQ ID NO: 9168 - RNA, 22 nt, Unknown
  Description of Unknown: Target viral genome RNA sequence
guuguguacacacacugguacu

SEQ ID NO: 9169 - RNA, 22 nt, Unknown
  Description of Unknown: Target viral genome RNA sequence
augcgcaaacagguucaucuaa

SEQ ID NO: 9170 - RNA, 22 nt, Unknown
  Description of Unknown: Target viral genome RNA sequence
accaugucauaucaacaucaca

SEQ ID NO: 9171 - RNA, 22 nt, Unknown
  Description of Unknown: Target viral genome RNA sequence
auguggucauucaauccagaaa

SEQ ID NO: 9172 - RNA, 22 nt, Unknown
  Description of Unknown: Target viral genome RNA sequence
uguggucauucaauccagaaac

SEQ ID NO: 9173 - RNA, 22 nt, Unknown
  Description of Unknown: Target viral genome RNA sequence
gaccaugucauaucaacaucac

SEQ ID NO: 9174 - RNA, 22 nt, Unknown
  Description of Unknown: Target viral genome RNA sequence
gaaagagccaccacauuuucac

SEQ ID NO: 9175 - RNA, 22 nt, Unknown
  Description of Unknown: Target viral genome RNA sequence
aaagagccaccacauuuucacc

SEQ ID NO: 9176 - RNA, 22 nt, Unknown
  Description of Unknown: Target viral genome RNA sequence
uugaaagagccaccacauuuuc

SEQ ID NO: 9177 - RNA, 22 nt, Unknown
  Description of Unknown: Target viral genome RNA sequence
ugaaagagccaccacauuuuca

SEQ ID NO: 9178 - RNA, 22 nt, Unknown
  Description of Unknown: Target viral genome RNA sequence
gagccaccacauuuucaccgag

SEQ ID NO: 9179 - RNA, 22 nt, Unknown
  Description of Unknown: Target viral genome RNA sequence
agccaccacauuuucaccgagg

SEQ ID NO: 9180 - RNA, 22 nt, Unknown
  Description of Unknown: Target viral genome RNA sequence
aagagccaccacauuuucaccg

SEQ ID NO: 9181 - RNA, 22 nt, Unknown
  Description of Unknown: Target viral genome RNA sequence
agagccaccacauuuucaccga

SEQ ID NO: 9182 - RNA, 22 nt, Unknown
  Description of Unknown: Target viral genome RNA sequence
gccaccacauuuucaccgaggc

SEQ ID NO: 9183 - RNA, 22 nt, Unknown
  Description of Unknown: Target viral genome RNA sequence
ccaccacauuuucaccgaggcc

SEQ ID NO: 9184 - RNA, 22 nt, Unknown
  Description of Unknown: Target viral genome RNA sequence
agcaguaggggaacuucuccug

SEQ ID NO: 9185 - RNA, 22 nt, Unknown
  Description of Unknown: Target viral genome RNA sequence
gcaguaggggaacuucuccugc

SEQ ID NO: 9186 - RNA, 22 nt, Unknown
  Description of Unknown: Target viral genome RNA sequence
ggcagcaguaggggaacuucuc

SEQ ID NO: 9187 - RNA, 22 nt, Unknown
  Description of Unknown: Target viral genome RNA sequence
gcagcaguaggggaacuucucc

SEQ ID NO: 9188 - RNA, 22 nt, Unknown
  Description of Unknown: Target viral genome RNA sequence
cagcaguaggggaacuucuccu

SEQ ID NO: 9189 - RNA, 22 nt, Unknown
  Description of Unknown: Target viral genome RNA sequence
ccuuuugauguuguuagacaau

SEQ ID NO: 9190 - RNA, 22 nt, Unknown
  Description of Unknown: Target viral genome RNA sequence
cuuuugauguuguuagacaaug

SEQ ID NO: 9191 - RNA, 22 nt, Unknown
  Description of Unknown: Target viral genome RNA sequence
ugguuagaauguacaucuucuu

SEQ ID NO: 9192 - RNA, 22 nt, Unknown
  Description of Unknown: Target viral genome RNA sequence
uuugauguuguuagacaaugcu

SEQ ID NO: 9193 - RNA, 22 nt, Unknown
  Description of Unknown: Target viral genome RNA sequence
uacaccuuuugauguuguuaga

SEQ ID NO: 9194 - RNA, 22 nt, Unknown
  Description of Unknown: Target viral genome RNA sequence
acaccuuuugauguuguuagac

SEQ ID NO: 9195 - RNA, 22 nt, Unknown
  Description of Unknown: Target viral genome RNA sequence
caccuuuugauguuguuagaca

SEQ ID NO: 9196 - RNA, 22 nt, Unknown
  Description of Unknown: Target viral genome RNA sequence
accuuuugauguuguuagacaa

SEQ ID NO: 9197 - RNA, 22 nt, Unknown
  Description of Unknown: Target viral genome RNA sequence
uugauguuguuagacaaugcuc

SEQ ID NO: 9198 - RNA, 22 nt, Unknown
  Description of Unknown: Target viral genome RNA sequence
ugauguuguuagacaaugcuca

SEQ ID NO: 9199 - RNA, 22 nt, Unknown
  Description of Unknown: Target viral genome RNA sequence
aaacagcucacucuuguaaugu

SEQ ID NO: 9200 - RNA, 22 nt, Unknown
  Description of Unknown: Target viral genome RNA sequence
ugaaacagcucacucuuguaau

SEQ ID NO: 9201 - RNA, 22 nt, Unknown
  Description of Unknown: Target viral genome RNA sequence
uaugacuuugcugugucuaagg

SEQ ID NO: 9202 - RNA, 22 nt, Unknown
  Description of Unknown: Target viral genome RNA sequence
gacuuugcugugucuaaggguu

SEQ ID NO: 9203 - RNA, 22 nt, Unknown
  Description of Unknown: Target viral genome RNA sequence
gcagcccgucuuacaccgugcg

SEQ ID NO: 9204 - RNA, 22 nt, Unknown
  Description of Unknown: Target viral genome RNA sequence
ugcagcccgucuuacaccgugc

SEQ ID NO: 9205 - RNA, 22 nt, Unknown
  Description of Unknown: Target viral genome RNA sequence
gugcagcccgucuuacaccgug

SEQ ID NO: 9206 - RNA, 22 nt, Unknown
  Description of Unknown: Target viral genome RNA sequence
agugcagcccgucuuacaccgu

SEQ ID NO: 9207 - RNA, 22 nt, Unknown
  Description of Unknown: Target viral genome RNA sequence
aagugcagcccgucuuacaccg

SEQ ID NO: 9208 - RNA, 22 nt, Unknown
  Description of Unknown: Target viral genome RNA sequence
uaagugcagcccgucuuacacc

SEQ ID NO: 9209 - RNA, 22 nt, Unknown
  Description of Unknown: Target viral genome RNA sequence
guaagugcagcccgucuuacac

SEQ ID NO: 9210 - RNA, 22 nt, Unknown
  Description of Unknown: Target viral genome RNA sequence
uguaagugcagcccgucuuaca

SEQ ID NO: 9211 - RNA, 22 nt, Unknown
  Description of Unknown: Target viral genome RNA sequence
guguaagugcagcccgucuuac

SEQ ID NO: 9212 - RNA, 22 nt, Unknown
  Description of Unknown: Target viral genome RNA sequence
gguguaagugcagcccgucuua

SEQ ID NO: 9213 - RNA, 22 nt, Unknown
  Description of Unknown: Target viral genome RNA sequence
guguacugacauuagauaauca

SEQ ID NO: 9214 - RNA, 22 nt, Unknown
  Description of Unknown: Target viral genome RNA sequence
uacugacauuagauaaucaaga

SEQ ID NO: 9215 - RNA, 22 nt, Unknown
  Description of Unknown: Target viral genome RNA sequence
guacugacauuagauaaucaag

SEQ ID NO: 9216 - RNA, 22 nt, Unknown
  Description of Unknown: Target viral genome RNA sequence
gguguacugacauuagauaauc

SEQ ID NO: 9217 - RNA, 22 nt, Unknown
  Description of Unknown: Target viral genome RNA sequence
cugacauuagauaaucaagauc

SEQ ID NO: 9218 - RNA, 22 nt, Unknown
  Description of Unknown: Target viral genome RNA sequence
acugacauuagauaaucaagau

SEQ ID NO: 9219 - RNA, 22 nt, Unknown
  Description of Unknown: Target viral genome RNA sequence
uuguacaguaagugacaacaga

SEQ ID NO: 9220 - RNA, 22 nt, Unknown
  Description of Unknown: Target viral genome RNA sequence
cuuguacaguaagugacaacag

SEQ ID NO: 9221 - RNA, 22 nt, Unknown
  Description of Unknown: Target viral genome RNA sequence
guacaguaagugacaacagaug

SEQ ID NO: 9222 - RNA, 22 nt, Unknown
  Description of Unknown: Target viral genome RNA sequence
uguacaguaagugacaacagau

SEQ ID NO: 9223 - RNA, 22 nt, Unknown
  Description of Unknown: Target viral genome RNA sequence
uugcuuguacaguaagugacaa

SEQ ID NO: 9224 - RNA, 22 nt, Unknown
  Description of Unknown: Target viral genome RNA sequence
uuugcuuguacaguaagugaca

SEQ ID NO: 9225 - RNA, 22 nt, Unknown
  Description of Unknown: Target viral genome RNA sequence
gcuuguacaguaagugacaaca

SEQ ID NO: 9226 - RNA, 22 nt, Unknown
  Description of Unknown: Target viral genome RNA sequence
ugcuuguacaguaagugacaac

SEQ ID NO: 9227 - RNA, 22 nt, Unknown
  Description of Unknown: Target viral genome RNA sequence
acaguaagugacaacagauguu

SEQ ID NO: 9228 - RNA, 22 nt, Unknown
  Description of Unknown: Target viral genome RNA sequence
uacaguaagugacaacagaugu

SEQ ID NO: 9229 - RNA, 22 nt, Unknown
  Description of Unknown: Target viral genome RNA sequence
aaaugucugauaauggacccca

SEQ ID NO: 9230 - RNA, 22 nt, Unknown
  Description of Unknown: Target viral genome RNA sequence
aauuauaaauuaccagaugauu

SEQ ID NO: 9231 - RNA, 22 nt, Unknown
  Description of Unknown: Target viral genome RNA sequence
uaauuauaaauuaccagaugau

SEQ ID NO: 9232 - RNA, 22 nt, Unknown
  Description of Unknown: Target viral genome RNA sequence
uguucccaccuacaaguuuugg

SEQ ID NO: 9233 - RNA, 22 nt, Unknown
  Description of Unknown: Target viral genome RNA sequence
cagaacauucuuggaaugcuga

SEQ ID NO: 9234 - RNA, 22 nt, Unknown
  Description of Unknown: Target viral genome RNA sequence
acagaacauucuuggaaugcug

SEQ ID NO: 9235 - RNA, 22 nt, Unknown
  Description of Unknown: Target viral genome RNA sequence
guacauaaucaggauguaaacu

SEQ ID NO: 9236 - RNA, 22 nt, Unknown
  Description of Unknown: Target viral genome RNA sequence
auaacagaacauucuuggaaug

SEQ ID NO: 9237 - RNA, 22 nt, Unknown
  Description of Unknown: Target viral genome RNA sequence
guuguacauaaucaggauguaa

SEQ ID NO: 9238 - RNA, 22 nt, Unknown
  Description of Unknown: Target viral genome RNA sequence
uuguacauaaucaggauguaaa

SEQ ID NO: 9239 - RNA, 22 nt, Unknown
  Description of Unknown: Target viral genome RNA sequence
uguacauaaucaggauguaaac

SEQ ID NO: 9240 - RNA, 22 nt, Unknown
  Description of Unknown: Target viral genome RNA sequence
agaaaucugcugcugaggcuuc

SEQ ID NO: 9241 - RNA, 22 nt, Unknown
  Description of Unknown: Target viral genome RNA sequence
aagaaaucugcugcugaggcuu

SEQ ID NO: 9242 - RNA, 22 nt, Unknown
  Description of Unknown: Target viral genome RNA sequence
aaaucugcugcugaggcuucua

SEQ ID NO: 9243 - RNA, 22 nt, Unknown
  Description of Unknown: Target viral genome RNA sequence
gaaaucugcugcugaggcuucu

SEQ ID NO: 9244 - RNA, 22 nt, Unknown
  Description of Unknown: Target viral genome RNA sequence
aaucugcugcugaggcuucuaa

SEQ ID NO: 9245 - RNA, 22 nt, Unknown
  Description of Unknown: Target viral genome RNA sequence
aguacaaguauuuuaguggagc

SEQ ID NO: 9246 - RNA, 22 nt, Unknown
  Description of Unknown: Target viral genome RNA sequence
aaguacaaguauuuuaguggag

SEQ ID NO: 9247 - RNA, 22 nt, Unknown
  Description of Unknown: Target viral genome RNA sequence
gcuaauaguguuuuuaacauuu

SEQ ID NO: 9248 - RNA, 22 nt, Unknown
  Description of Unknown: Target viral genome RNA sequence
ugcuaauaguguuuuuaacauu

SEQ ID NO: 9249 - RNA, 22 nt, Unknown
  Description of Unknown: Target viral genome RNA sequence
augcuaauaguguuuuuaacau

SEQ ID NO: 9250 - RNA, 22 nt, Unknown
  Description of Unknown: Target viral genome RNA sequence
uaugcuaauaguguuuuuaaca

SEQ ID NO: 9251 - RNA, 22 nt, Unknown
  Description of Unknown: Target viral genome RNA sequence
uuaugcuaauaguguuuuuaac

SEQ ID NO: 9252 - RNA, 22 nt, Unknown
  Description of Unknown: Target viral genome RNA sequence
cuuaugcuaauaguguuuuuaa

SEQ ID NO: 9253 - RNA, 22 nt, Unknown
  Description of Unknown: Target viral genome RNA sequence
gcuuaugcuaauaguguuuuua

SEQ ID NO: 9254 - RNA, 22 nt, Unknown
  Description of Unknown: Target viral genome RNA sequence
ugcuuaugcuaauaguguuuuu

SEQ ID NO: 9255 - RNA, 22 nt, Unknown
  Description of Unknown: Target viral genome RNA sequence
uaauaguguuuuuaacauuugu

SEQ ID NO: 9256 - RNA, 22 nt, Unknown
  Description of Unknown: Target viral genome RNA sequence
cuaauaguguuuuuaacauuug

SEQ ID NO: 9257 - RNA, 22 nt, Unknown
  Description of Unknown: Target viral genome RNA sequence
cugguuuuccauuuaauaaaug

SEQ ID NO: 9258 - RNA, 22 nt, Unknown
  Description of Unknown: Target viral genome RNA sequence
ugguuuuccauuuaauaaaugg

SEQ ID NO: 9259 - RNA, 22 nt, Unknown
  Description of Unknown: Target viral genome RNA sequence
gguuuuccauuuaauaaauggg

SEQ ID NO: 9260 - RNA, 22 nt, Unknown
  Description of Unknown: Target viral genome RNA sequence
guuuuccauuuaauaaaugggg

SEQ ID NO: 9261 - RNA, 22 nt, Unknown
  Description of Unknown: Target viral genome RNA sequence
ucagcugguuuuccauuuaaua

SEQ ID NO: 9262 - RNA, 22 nt, Unknown
  Description of Unknown: Target viral genome RNA sequence
cagcugguuuuccauuuaauaa

SEQ ID NO: 9263 - RNA, 22 nt, Unknown
  Description of Unknown: Target viral genome RNA sequence
agcugguuuuccauuuaauaaa

SEQ ID NO: 9264 - RNA, 22 nt, Unknown
  Description of Unknown: Target viral genome RNA sequence
gcugguuuuccauuuaauaaau

SEQ ID NO: 9265 - RNA, 22 nt, Unknown
  Description of Unknown: Target viral genome RNA sequence
uuuuccauuuaauaaauggggu

SEQ ID NO: 9266 - RNA, 22 nt, Unknown
  Description of Unknown: Target viral genome RNA sequence
uguaccgucugcgguaugugga

SEQ ID NO: 9267 - RNA, 22 nt, Unknown
  Description of Unknown: Target viral genome RNA sequence
cuguaccgucugcgguaugugg

SEQ ID NO: 9268 - RNA, 22 nt, Unknown
  Description of Unknown: Target viral genome RNA sequence
cagucuguaccgucugcgguau

SEQ ID NO: 9269 - RNA, 22 nt, Unknown
  Description of Unknown: Target viral genome RNA sequence
uaccgucugcgguauguggaaa

SEQ ID NO: 9270 - RNA, 22 nt, Unknown
  Description of Unknown: Target viral genome RNA sequence
accgucugcgguauguggaaag

SEQ ID NO: 9271 - RNA, 22 nt, Unknown
  Description of Unknown: Target viral genome RNA sequence
caaugcuagggagagcugccua

SEQ ID NO: 9272 - RNA, 22 nt, Unknown
  Description of Unknown: Target viral genome RNA sequence
acaaugcuagggagagcugccu

SEQ ID NO: 9273 - RNA, 22 nt, Unknown
  Description of Unknown: Target viral genome RNA sequence
acagugaacaaugcuagggaga

SEQ ID NO: 9274 - RNA, 22 nt, Unknown
  Description of Unknown: Target viral genome RNA sequence
uacagugaacaaugcuagggag

SEQ ID NO: 9275 - RNA, 22 nt, Unknown
  Description of Unknown: Target viral genome RNA sequence
agugaacaaugcuagggagagc

SEQ ID NO: 9276 - RNA, 22 nt, Unknown
  Description of Unknown: Target viral genome RNA sequence
cagugaacaaugcuagggagag

SEQ ID NO: 9277 - RNA, 22 nt, Unknown
  Description of Unknown: Target viral genome RNA sequence
ugaacaaugcuagggagagcug

SEQ ID NO: 9278 - RNA, 22 nt, Unknown
  Description of Unknown: Target viral genome RNA sequence
gugaacaaugcuagggagagcu

SEQ ID NO: 9279 - RNA, 22 nt, Unknown
  Description of Unknown: Target viral genome RNA sequence
aacaaugcuagggagagcugcc

SEQ ID NO: 9280 - RNA, 22 nt, Unknown
  Description of Unknown: Target viral genome RNA sequence
gaacaaugcuagggagagcugc

SEQ ID NO: 9281 - RNA, 22 nt, Unknown
  Description of Unknown: Target viral genome RNA sequence
cuugaacaauggaaccuaguaa

SEQ ID NO: 9282 - RNA, 22 nt, Unknown
  Description of Unknown: Target viral genome RNA sequence
ccuugaacaauggaaccuagua

SEQ ID NO: 9283 - RNA, 22 nt, Unknown
  Description of Unknown: Target viral genome RNA sequence
uccuugaacaauggaaccuagu

SEQ ID NO: 9284 - RNA, 22 nt, Unknown
  Description of Unknown: Target viral genome RNA sequence
cuccuugaacaauggaaccuag

SEQ ID NO: 9285 - RNA, 22 nt, Unknown
  Description of Unknown: Target viral genome RNA sequence
ugaacaauggaaccuaguaaua

SEQ ID NO: 9286 - RNA, 22 nt, Unknown
  Description of Unknown: Target viral genome RNA sequence
uugaacaauggaaccuaguaau

SEQ ID NO: 9287 - RNA, 22 nt, Unknown
  Description of Unknown: Target viral genome RNA sequence
ccaccugguacugguaagaguc

SEQ ID NO: 9288 - RNA, 22 nt, Unknown
  Description of Unknown: Target viral genome RNA sequence
caccugguacugguaagaguca

SEQ ID NO: 9289 - RNA, 22 nt, Unknown
  Description of Unknown: Target viral genome RNA sequence
gguacugguaagagucauuuug

SEQ ID NO: 9290 - RNA, 22 nt, Unknown
  Description of Unknown: Target viral genome RNA sequence
gguucuguuagagugguaacaa

SEQ ID NO: 9291 - RNA, 22 nt, Unknown
  Description of Unknown: Target viral genome RNA sequence
guacugguaagagucauuuugc

SEQ ID NO: 9292 - RNA, 22 nt, Unknown
  Description of Unknown: Target viral genome RNA sequence
ugguacacuuaugauugaacgg

SEQ ID NO: 9293 - RNA, 22 nt, Unknown
  Description of Unknown: Target viral genome RNA sequence
uuacaccuuuugauguuguuag

SEQ ID NO: 9294 - RNA, 22 nt, Unknown
  Description of Unknown: Target viral genome RNA sequence
uaacagaacauucuuggaaugc

SEQ ID NO: 9295 - RNA, 22 nt, Unknown
  Description of Unknown: Target viral genome RNA sequence
ccaaauuggcuacuaccgaaga

SEQ ID NO: 9296 - RNA, 22 nt, Unknown
  Description of Unknown: Target viral genome RNA sequence
accaaauuggcuacuaccgaag

SEQ ID NO: 9297 - RNA, 22 nt, Unknown
  Description of Unknown: Target viral genome RNA sequence
gaccaaauuggcuacuaccgaa

SEQ ID NO: 9298 - RNA, 22 nt, Unknown
  Description of Unknown: Target viral genome RNA sequence
ugaccaaauuggcuacuaccga

SEQ ID NO: 9299 - RNA, 22 nt, Unknown
  Description of Unknown: Target viral genome RNA sequence
augaccaaauuggcuacuaccg

SEQ ID NO: 9300 - RNA, 22 nt, Unknown
  Description of Unknown: Target viral genome RNA sequence
gaugaccaaauuggcuacuacc

SEQ ID NO: 9301 - RNA, 22 nt, Unknown
  Description of Unknown: Target viral genome RNA sequence
agaugaccaaauuggcuacuac

SEQ ID NO: 9302 - RNA, 22 nt, Unknown
  Description of Unknown: Target viral genome RNA sequence
cagaugaccaaauuggcuacua

SEQ ID NO: 9303 - RNA, 22 nt, Unknown
  Description of Unknown: Target viral genome RNA sequence
aaauuggcuacuaccgaagagc

SEQ ID NO: 9304 - RNA, 22 nt, Unknown
  Description of Unknown: Target viral genome RNA sequence
caaauuggcuacuaccgaagag

SEQ ID NO: 9305 - RNA, 22 nt, Unknown
  Description of Unknown: Target viral genome RNA sequence
gauaacagaacauucuuggaau

SEQ ID NO: 9306 - RNA, 22 nt, Unknown
  Description of Unknown: Target viral genome RNA sequence
ggcuugucuuguaggcuugaug

SEQ ID NO: 9307 - RNA, 22 nt, Unknown
  Description of Unknown: Target viral genome RNA sequence
gcuugucuuguaggcuugaugu

SEQ ID NO: 9308 - RNA, 22 nt, Unknown
  Description of Unknown: Target viral genome RNA sequence
gcaauggcuugucuuguaggcu

SEQ ID NO: 9309 - RNA, 22 nt, Unknown
  Description of Unknown: Target viral genome RNA sequence
caauggcuugucuuguaggcuu

SEQ ID NO: 9310 - RNA, 22 nt, Unknown
  Description of Unknown: Target viral genome RNA sequence
aauggcuugucuuguaggcuug

SEQ ID NO: 9311 - RNA, 22 nt, Unknown
  Description of Unknown: Target viral genome RNA sequence
auggcuugucuuguaggcuuga

SEQ ID NO: 9312 - RNA, 22 nt, Unknown
  Description of Unknown: Target viral genome RNA sequence
uggcuugucuuguaggcuugau

SEQ ID NO: 9313 - RNA, 22 nt, Unknown
  Description of Unknown: Target viral genome RNA sequence
gcaccuacacaccucaguguug

SEQ ID NO: 9314 - RNA, 22 nt, Unknown
  Description of Unknown: Target viral genome RNA sequence
aggcaccuacacaccucagugu

SEQ ID NO: 9315 - RNA, 22 nt, Unknown
  Description of Unknown: Target viral genome RNA sequence
ggcaccuacacaccucaguguu

SEQ ID NO: 9316 - RNA, 22 nt, Unknown
  Description of Unknown: Target viral genome RNA sequence
acaggcaccuacacaccucagu

SEQ ID NO: 9317 - RNA, 22 nt, Unknown
  Description of Unknown: Target viral genome RNA sequence
caggcaccuacacaccucagug

SEQ ID NO: 9318 - RNA, 22 nt, Unknown
  Description of Unknown: Target viral genome RNA sequence
acacaggcaccuacacaccuca

SEQ ID NO: 9319 - RNA, 22 nt, Unknown
  Description of Unknown: Target viral genome RNA sequence
cacaggcaccuacacaccucag

SEQ ID NO: 9320 - RNA, 22 nt, Unknown
  Description of Unknown: Target viral genome RNA sequence
cuacacaggcaccuacacaccu

SEQ ID NO: 9321 - RNA, 22 nt, Unknown
  Description of Unknown: Target viral genome RNA sequence
uacacaggcaccuacacaccuc

SEQ ID NO: 9322 - RNA, 22 nt, Unknown
  Description of Unknown: Target viral genome RNA sequence
agaaugaauucucguaacuaca

SEQ ID NO: 9323 - RNA, 22 nt, Unknown
  Description of Unknown: Target viral genome RNA sequence
uugugcagaaugaauucucgua

SEQ ID NO: 9324 - RNA, 22 nt, Unknown
  Description of Unknown: Target viral genome RNA sequence
ugugcagaaugaauucucguaa

SEQ ID NO: 9325 - RNA, 22 nt, Unknown
  Description of Unknown: Target viral genome RNA sequence
ucuugugcagaaugaauucucg

SEQ ID NO: 9326 - RNA, 22 nt, Unknown
  Description of Unknown: Target viral genome RNA sequence
gcagaaugaauucucguaacua

SEQ ID NO: 9327 - RNA, 22 nt, Unknown
  Description of Unknown: Target viral genome RNA sequence
cagaaugaauucucguaacuac

SEQ ID NO: 9328 - RNA, 22 nt, Unknown
  Description of Unknown: Target viral genome RNA sequence
gugcagaaugaauucucguaac

SEQ ID NO: 9329 - RNA, 22 nt, Unknown
  Description of Unknown: Target viral genome RNA sequence
ugcagaaugaauucucguaacu

SEQ ID NO: 9330 - RNA, 22 nt, Unknown
  Description of Unknown: Target viral genome RNA sequence
auuacuacagacaacacauuug

SEQ ID NO: 9331 - RNA, 22 nt, Unknown
  Description of Unknown: Target viral genome RNA sequence
uuacuacagacaacacauuugu

SEQ ID NO: 9332 - RNA, 22 nt, Unknown
  Description of Unknown: Target viral genome RNA sequence
gauugaaccagcuugagagcaa

SEQ ID NO: 9333 - RNA, 22 nt, Unknown
  Description of Unknown: Target viral genome RNA sequence
auugaaccagcuugagagcaaa

SEQ ID NO: 9334 - RNA, 22 nt, Unknown
  Description of Unknown: Target viral genome RNA sequence
gacagauugaaccagcuugaga

SEQ ID NO: 9335 - RNA, 22 nt, Unknown
  Description of Unknown: Target viral genome RNA sequence
acagauugaaccagcuugagag

SEQ ID NO: 9336 - RNA, 22 nt, Unknown
  Description of Unknown: Target viral genome RNA sequence
cagauugaaccagcuugagagc

SEQ ID NO: 9337 - RNA, 22 nt, Unknown
  Description of Unknown: Target viral genome RNA sequence
agauugaaccagcuugagagca

SEQ ID NO: 9338 - RNA, 22 nt, Unknown
  Description of Unknown: Target viral genome RNA sequence
ugucugguaaaggccaacaaca

SEQ ID NO: 9339 - RNA, 22 nt, Unknown
  Description of Unknown: Target viral genome RNA sequence
auaaguacuuugauuguuacga

SEQ ID NO: 9340 - RNA, 22 nt, Unknown
  Description of Unknown: Target viral genome RNA sequence
gauaaguacuuugauuguuacg

SEQ ID NO: 9341 - RNA, 22 nt, Unknown
  Description of Unknown: Target viral genome RNA sequence
ugauaaguacuuugauuguuac

SEQ ID NO: 9342 - RNA, 22 nt, Unknown
  Description of Unknown: Target viral genome RNA sequence
uugauaaguacuuugauuguua

SEQ ID NO: 9343 - RNA, 22 nt, Unknown
  Description of Unknown: Target viral genome RNA sequence
guugauaaguacuuugauuguu

SEQ ID NO: 9344 - RNA, 22 nt, Unknown
  Description of Unknown: Target viral genome RNA sequence
uguugauaaguacuuugauugu

SEQ ID NO: 9345 - RNA, 22 nt, Unknown
  Description of Unknown: Target viral genome RNA sequence
uuguugauaaguacuuugauug

SEQ ID NO: 9346 - RNA, 22 nt, Unknown
  Description of Unknown: Target viral genome RNA sequence
guuguugauaaguacuuugauu

SEQ ID NO: 9347 - RNA, 22 nt, Unknown
  Description of Unknown: Target viral genome RNA sequence
aguuguugauaaguacuuugau

SEQ ID NO: 9348 - RNA, 22 nt, Unknown
  Description of Unknown: Target viral genome RNA sequence
aaguuguugauaaguacuuuga

SEQ ID NO: 9349 - RNA, 22 nt, Unknown
  Description of Unknown: Target viral genome RNA sequence
ucuaugacuuugcugugucuaa

SEQ ID NO: 9350 - RNA, 22 nt, Unknown
  Description of Unknown: Target viral genome RNA sequence
augacuuugcugugucuaaggg

SEQ ID NO: 9351 - RNA, 22 nt, Unknown
  Description of Unknown: Target viral genome RNA sequence
acuucuaugacuuugcuguguc

SEQ ID NO: 9352 - RNA, 22 nt, Unknown
  Description of Unknown: Target viral genome RNA sequence
gacuucuaugacuuugcugugu

SEQ ID NO: 9353 - RNA, 22 nt, Unknown
  Description of Unknown: Target viral genome RNA sequence
uucuaugacuuugcugugucua

SEQ ID NO: 9354 - RNA, 22 nt, Unknown
  Description of Unknown: Target viral genome RNA sequence
cuucuaugacuuugcugugucu

SEQ ID NO: 9355 - RNA, 22 nt, Unknown
  Description of Unknown: Target viral genome RNA sequence
ugacuuugcugugucuaagggu

SEQ ID NO: 9356 - RNA, 22 nt, Unknown
  Description of Unknown: Target viral genome RNA sequence
aacagaacauucuuggaaugcu

SEQ ID NO: 9357 - RNA, 22 nt, Unknown
  Description of Unknown: Target viral genome RNA sequence
cuguuuuucagagcgcuuccaa

SEQ ID NO: 9358 - RNA, 22 nt, Unknown
  Description of Unknown: Target viral genome RNA sequence
uguuuuucagagcgcuuccaaa

SEQ ID NO: 9359 - RNA, 22 nt, Unknown
  Description of Unknown: Target viral genome RNA sequence
ugcuguuuuucagagcgcuucc

SEQ ID NO: 9360 - RNA, 22 nt, Unknown
  Description of Unknown: Target viral genome RNA sequence
gcuguuuuucagagcgcuucca

SEQ ID NO: 9361 - RNA, 22 nt, Unknown
  Description of Unknown: Target viral genome RNA sequence
cagaauauuucaauucagugug

SEQ ID NO: 9362 - RNA, 22 nt, Unknown
  Description of Unknown: Target viral genome RNA sequence
aauaucuaguacaacaggaguc

SEQ ID NO: 9363 - RNA, 22 nt, Unknown
  Description of Unknown: Target viral genome RNA sequence
acugugagugcuuugguuuaug

SEQ ID NO: 9364 - RNA, 22 nt, Unknown
  Description of Unknown: Target viral genome RNA sequence
gcuguaguugugaucaacuccg

SEQ ID NO: 9365 - RNA, 22 nt, Unknown
  Description of Unknown: Target viral genome RNA sequence
ggcuguaguugugaucaacucc

SEQ ID NO: 9366 - RNA, 22 nt, Unknown
  Description of Unknown: Target viral genome RNA sequence
uggcuguaguugugaucaacuc

SEQ ID NO: 9367 - RNA, 22 nt, Unknown
  Description of Unknown: Target viral genome RNA sequence
auggcuguaguugugaucaacu

SEQ ID NO: 9368 - RNA, 22 nt, Unknown
  Description of Unknown: Target viral genome RNA sequence
uauggcuguaguugugaucaac

SEQ ID NO: 9369 - RNA, 22 nt, Unknown
  Description of Unknown: Target viral genome RNA sequence
uuauggcuguaguugugaucaa

SEQ ID NO: 9370 - RNA, 22 nt, Unknown
  Description of Unknown: Target viral genome RNA sequence
guuauggcuguaguugugauca

SEQ ID NO: 9371 - RNA, 22 nt, Unknown
  Description of Unknown: Target viral genome RNA sequence
gguuauggcuguaguugugauc

SEQ ID NO: 9372 - RNA, 22 nt, Unknown
  Description of Unknown: Target viral genome RNA sequence
uguaguugugaucaacuccgcg

SEQ ID NO: 9373 - RNA, 22 nt, Unknown
  Description of Unknown: Target viral genome RNA sequence
cuguaguugugaucaacuccgc

SEQ ID NO: 9374 - RNA, 22 nt, Unknown
  Description of Unknown: Target viral genome RNA sequence
auguuggacugagacugaccuu

SEQ ID NO: 9375 - RNA, 22 nt, Unknown
  Description of Unknown: Target viral genome RNA sequence
aagucaguucuuuauuaucaaa

SEQ ID NO: 9376 - RNA, 22 nt, Unknown
  Description of Unknown: Target viral genome RNA sequence
aacaauguuuuuaugucugaag

SEQ ID NO: 9377 - RNA, 22 nt, Unknown
  Description of Unknown: Target viral genome RNA sequence
acaauguuuuuaugucugaagc

SEQ ID NO: 9378 - RNA, 22 nt, Unknown
  Description of Unknown: Target viral genome RNA sequence
acccuucugcucgcauagugua

SEQ ID NO: 9379 - RNA, 22 nt, Unknown
  Description of Unknown: Target viral genome RNA sequence
ccuucugcucgcauaguguaua

SEQ ID NO: 9380 - RNA, 22 nt, Unknown
  Description of Unknown: Target viral genome RNA sequence
cuucugcucgcauaguguauac

SEQ ID NO: 9381 - RNA, 22 nt, Unknown
  Description of Unknown: Target viral genome RNA sequence
uccacgagugcuuuguuaagcg

SEQ ID NO: 9382 - RNA, 22 nt, Unknown
  Description of Unknown: Target viral genome RNA sequence
guccacgagugcuuuguuaagc

SEQ ID NO: 9383 - RNA, 22 nt, Unknown
  Description of Unknown: Target viral genome RNA sequence
gccaugcaacguaaguuggaaa

SEQ ID NO: 9384 - RNA, 22 nt, Unknown
  Description of Unknown: Target viral genome RNA sequence
ucuugcuaguuacacuagccau

SEQ ID NO: 9385 - RNA, 22 nt, Unknown
  Description of Unknown: Target viral genome RNA sequence
cuugcuaguuacacuagccauc

SEQ ID NO: 9386 - RNA, 22 nt, Unknown
  Description of Unknown: Target viral genome RNA sequence
ugguauucuugcuaguuacacu

SEQ ID NO: 9387 - RNA, 22 nt, Unknown
  Description of Unknown: Target viral genome RNA sequence
gguauucuugcuaguuacacua

SEQ ID NO: 9388 - RNA, 22 nt, Unknown
  Description of Unknown: Target viral genome RNA sequence
cgugguauucuugcuaguuaca

SEQ ID NO: 9389 - RNA, 22 nt, Unknown
  Description of Unknown: Target viral genome RNA sequence
gugguauucuugcuaguuacac

SEQ ID NO: 9390 - RNA, 22 nt, Unknown
  Description of Unknown: Target viral genome RNA sequence
auucuugcuaguuacacuagcc

SEQ ID NO: 9391 - RNA, 22 nt, Unknown
  Description of Unknown: Target viral genome RNA sequence
guauucuugcuaguuacacuag

SEQ ID NO: 9392 - RNA, 22 nt, Unknown
  Description of Unknown: Target viral genome RNA sequence
uauucuugcuaguuacacuagc

SEQ ID NO: 9393 - RNA, 22 nt, Unknown
  Description of Unknown: Target viral genome RNA sequence
agaguugauuuuuguggaaagg

SEQ ID NO: 9394 - RNA, 22 nt, Unknown
  Description of Unknown: Target viral genome RNA sequence
aguguguacuuggacaaucaaa

SEQ ID NO: 9395 - RNA, 22 nt, Unknown
  Description of Unknown: Target viral genome RNA sequence
uugauuuuuguggaaagggcua

SEQ ID NO: 9396 - RNA, 22 nt, Unknown
  Description of Unknown: Target viral genome RNA sequence
guugauuuuuguggaaagggcu

SEQ ID NO: 9397 - RNA, 22 nt, Unknown
  Description of Unknown: Target viral genome RNA sequence
aguugauuuuuguggaaagggc

SEQ ID NO: 9398 - RNA, 22 nt, Unknown
  Description of Unknown: Target viral genome RNA sequence
gaguugauuuuuguggaaaggg

SEQ ID NO: 9399 - RNA, 22 nt, Unknown
  Description of Unknown: Target viral genome RNA sequence
guguugcagccgaucaucagca

SEQ ID NO: 9400 - RNA, 22 nt, Unknown
  Description of Unknown: Target viral genome RNA sequence
cguguugcagccgaucaucagc

SEQ ID NO: 9401 - RNA, 22 nt, Unknown
  Description of Unknown: Target viral genome RNA sequence
ccguguugcagccgaucaucag

SEQ ID NO: 9402 - RNA, 22 nt, Unknown
  Description of Unknown: Target viral genome RNA sequence
uccguguugcagccgaucauca

SEQ ID NO: 9403 - RNA, 22 nt, Unknown
  Description of Unknown: Target viral genome RNA sequence
guccguguugcagccgaucauc

SEQ ID NO: 9404 - RNA, 22 nt, Unknown
  Description of Unknown: Target viral genome RNA sequence
cguccguguugcagccgaucau

SEQ ID NO: 9405 - RNA, 22 nt, Unknown
  Description of Unknown: Target viral genome RNA sequence
uaccaggaguuuucuguggugu

SEQ ID NO: 9406 - RNA, 22 nt, Unknown
  Description of Unknown: Target viral genome RNA sequence
cguagcuggugucucuaucugu

SEQ ID NO: 9407 - RNA, 22 nt, Unknown
  Description of Unknown: Target viral genome RNA sequence
guagcuggugucucuaucugua

SEQ ID NO: 9408 - RNA, 22 nt, Unknown
  Description of Unknown: Target viral genome RNA sequence
gcucgcaccguagcuggugucu

SEQ ID NO: 9409 - RNA, 22 nt, Unknown
  Description of Unknown: Target viral genome RNA sequence
cucgcaccguagcuggugucuc

SEQ ID NO: 9410 - RNA, 22 nt, Unknown
  Description of Unknown: Target viral genome RNA sequence
ucgcaccguagcuggugucucu

SEQ ID NO: 9411 - RNA, 22 nt, Unknown
  Description of Unknown: Target viral genome RNA sequence
cgcaccguagcuggugucucua

SEQ ID NO: 9412 - RNA, 22 nt, Unknown
  Description of Unknown: Target viral genome RNA sequence
gcaccguagcuggugucucuau

SEQ ID NO: 9413 - RNA, 22 nt, Unknown
  Description of Unknown: Target viral genome RNA sequence
caccguagcuggugucucuauc

SEQ ID NO: 9414 - RNA, 22 nt, Unknown
  Description of Unknown: Target viral genome RNA sequence
accguagcuggugucucuaucu

SEQ ID NO: 9415 - RNA, 22 nt, Unknown
  Description of Unknown: Target viral genome RNA sequence
ccguagcuggugucucuaucug

SEQ ID NO: 9416 - RNA, 22 nt, Unknown
  Description of Unknown: Target viral genome RNA sequence
auauggguugcaacugagggag

SEQ ID NO: 9417 - RNA, 22 nt, Unknown
  Description of Unknown: Target viral genome RNA sequence
cauauggguugcaacugaggga

SEQ ID NO: 9418 - RNA, 22 nt, Unknown
  Description of Unknown: Target viral genome RNA sequence
ucauauggguugcaacugaggg

SEQ ID NO: 9419 - RNA, 22 nt, Unknown
  Description of Unknown: Target viral genome RNA sequence
aucauauggguugcaacugagg

SEQ ID NO: 9420 - RNA, 22 nt, Unknown
  Description of Unknown: Target viral genome RNA sequence
ggguugcaacugagggagccuu

SEQ ID NO: 9421 - RNA, 22 nt, Unknown
  Description of Unknown: Target viral genome RNA sequence
uggguugcaacugagggagccu

SEQ ID NO: 9422 - RNA, 22 nt, Unknown
  Description of Unknown: Target viral genome RNA sequence
auggguugcaacugagggagcc

SEQ ID NO: 9423 - RNA, 22 nt, Unknown
  Description of Unknown: Target viral genome RNA sequence
uauggguugcaacugagggagc

SEQ ID NO: 9424 - RNA, 22 nt, Unknown
  Description of Unknown: Target viral genome RNA sequence
guugcaacugagggagccuuga

SEQ ID NO: 9425 - RNA, 22 nt, Unknown
  Description of Unknown: Target viral genome RNA sequence
gguugcaacugagggagccuug

SEQ ID NO: 9426 - RNA, 22 nt, Unknown
  Description of Unknown: Target viral genome RNA sequence
ggaauugccguuuuagauaugu

SEQ ID NO: 9427 - RNA, 22 nt, Unknown
  Description of Unknown: Target viral genome RNA sequence
aauguuggacugagacugaccu

SEQ ID NO: 9428 - RNA, 22 nt, Unknown
  Description of Unknown: Target viral genome RNA sequence
aaauguuggacugagacugacc

SEQ ID NO: 9429 - RNA, 22 nt, Unknown
  Description of Unknown: Target viral genome RNA sequence
ccacaaaucauuacuacagaca

SEQ ID NO: 9430 - RNA, 22 nt, Unknown
  Description of Unknown: Target viral genome RNA sequence
cacaaaucauuacuacagacaa

SEQ ID NO: 9431 - RNA, 22 nt, Unknown
  Description of Unknown: Target viral genome RNA sequence
uacccuucugcucgcauagugu

SEQ ID NO: 9432 - RNA, 22 nt, Unknown
  Description of Unknown: Target viral genome RNA sequence
cccuucugcucgcauaguguau

SEQ ID NO: 9433 - RNA, 22 nt, Unknown
  Description of Unknown: Target viral genome RNA sequence
ucugcucgcauaguguauacag

SEQ ID NO: 9434 - RNA, 22 nt, Unknown
  Description of Unknown: Target viral genome RNA sequence
cugcucgcauaguguauacagc

SEQ ID NO: 9435 - RNA, 22 nt, Unknown
  Description of Unknown: Target viral genome RNA sequence
cugauguucuuuaccaaccacc

SEQ ID NO: 9436 - RNA, 22 nt, Unknown
  Description of Unknown: Target viral genome RNA sequence
guucaugugguaguguugguuu

SEQ ID NO: 9437 - RNA, 22 nt, Unknown
  Description of Unknown: Target viral genome RNA sequence
uucaugugguaguguugguuuu

SEQ ID NO: 9438 - RNA, 22 nt, Unknown
  Description of Unknown: Target viral genome RNA sequence
uuaaugguucaugugguagugu

SEQ ID NO: 9439 - RNA, 22 nt, Unknown
  Description of Unknown: Target viral genome RNA sequence
uaaugguucaugugguaguguu

SEQ ID NO: 9440 - RNA, 22 nt, Unknown
  Description of Unknown: Target viral genome RNA sequence
ccuuaaugguucaugugguagu

SEQ ID NO: 9441 - RNA, 22 nt, Unknown
  Description of Unknown: Target viral genome RNA sequence
cuuaaugguucaugugguagug

SEQ ID NO: 9442 - RNA, 22 nt, Unknown
  Description of Unknown: Target viral genome RNA sequence
ugguucaugugguaguguuggu

SEQ ID NO: 9443 - RNA, 22 nt, Unknown
  Description of Unknown: Target viral genome RNA sequence
gguucaugugguaguguugguu

SEQ ID NO: 9444 - RNA, 22 nt, Unknown
  Description of Unknown: Target viral genome RNA sequence
aaugguucaugugguaguguug

SEQ ID NO: 9445 - RNA, 22 nt, Unknown
  Description of Unknown: Target viral genome RNA sequence
augguucaugugguaguguugg

SEQ ID NO: 9446 - RNA, 22 nt, Unknown
  Description of Unknown: Target viral genome RNA sequence
gggugugaccgaaagguaagau

SEQ ID NO: 9447 - RNA, 22 nt, Unknown
  Description of Unknown: Target viral genome RNA sequence
cgggugugaccgaaagguaaga

SEQ ID NO: 9448 - RNA, 22 nt, Unknown
  Description of Unknown: Target viral genome RNA sequence
ccgggugugaccgaaagguaag

SEQ ID NO: 9449 - RNA, 22 nt, Unknown
  Description of Unknown: Target viral genome RNA sequence
uccgggugugaccgaaagguaa

SEQ ID NO: 9450 - RNA, 22 nt, Unknown
  Description of Unknown: Target viral genome RNA sequence
gugaccgaaagguaagauggag

SEQ ID NO: 9451 - RNA, 22 nt, Unknown
  Description of Unknown: Target viral genome RNA sequence
ugugaccgaaagguaagaugga

SEQ ID NO: 9452 - RNA, 22 nt, Unknown
  Description of Unknown: Target viral genome RNA sequence
gugugaccgaaagguaagaugg

SEQ ID NO: 9453 - RNA, 22 nt, Unknown
  Description of Unknown: Target viral genome RNA sequence
ggugugaccgaaagguaagaug

SEQ ID NO: 9454 - RNA, 22 nt, Unknown
  Description of Unknown: Target viral genome RNA sequence
gaccgaaagguaagauggagag

SEQ ID NO: 9455 - RNA, 22 nt, Unknown
  Description of Unknown: Target viral genome RNA sequence
ugaccgaaagguaagauggaga

SEQ ID NO: 9456 - RNA, 22 nt, Unknown
  Description of Unknown: Target viral genome RNA sequence
aacuccaggcagcaguagggga

SEQ ID NO: 9457 - RNA, 22 nt, Unknown
  Description of Unknown: Target viral genome RNA sequence
uucuugcuaguuacacuagcca

SEQ ID NO: 9458 - RNA, 22 nt, Unknown
  Description of Unknown: Target viral genome RNA sequence
acuccaggcagcaguaggggaa

SEQ ID NO: 9459 - RNA, 22 nt, Unknown
  Description of Unknown: Target viral genome RNA sequence
aauuguguuaacuguuuggaug

SEQ ID NO: 9460 - RNA, 22 nt, Unknown
  Description of Unknown: Target viral genome RNA sequence
auuguguuaacuguuuggauga

SEQ ID NO: 9461 - RNA, 22 nt, Unknown
  Description of Unknown: Target viral genome RNA sequence
auucaacuccaggcagcaguag

SEQ ID NO: 9462 - RNA, 22 nt, Unknown
  Description of Unknown: Target viral genome RNA sequence
uucaacuccaggcagcaguagg

SEQ ID NO: 9463 - RNA, 22 nt, Unknown
  Description of Unknown: Target viral genome RNA sequence
auacaauuguugugaugaugau

SEQ ID NO: 9464 - RNA, 22 nt, Unknown
  Description of Unknown: Target viral genome RNA sequence
cauacaauuguugugaugauga

SEQ ID NO: 9465 - RNA, 22 nt, Unknown
  Description of Unknown: Target viral genome RNA sequence
ucacauacaauuguugugauga

SEQ ID NO: 9466 - RNA, 22 nt, Unknown
  Description of Unknown: Target viral genome RNA sequence
gucacauacaauuguugugaug

SEQ ID NO: 9467 - RNA, 22 nt, Unknown
  Description of Unknown: Target viral genome RNA sequence
acauacaauuguugugaugaug

SEQ ID NO: 9468 - RNA, 22 nt, Unknown
  Description of Unknown: Target viral genome RNA sequence
cacauacaauuguugugaugau

SEQ ID NO: 9469 - RNA, 22 nt, Unknown
  Description of Unknown: Target viral genome RNA sequence
cugcuaucagcgauuaugacua

SEQ ID NO: 9470 - RNA, 22 nt, Unknown
  Description of Unknown: Target viral genome RNA sequence
gcugcuaucagcgauuaugacu

SEQ ID NO: 9471 - RNA, 22 nt, Unknown
  Description of Unknown: Target viral genome RNA sequence
agaaccagaauauuucaauuca

SEQ ID NO: 9472 - RNA, 22 nt, Unknown
  Description of Unknown: Target viral genome RNA sequence
aaccagaauauuucaauucagu

SEQ ID NO: 9473 - RNA, 22 nt, Unknown
  Description of Unknown: Target viral genome RNA sequence
accagaauauuucaauucagug

SEQ ID NO: 9474 - RNA, 22 nt, Unknown
  Description of Unknown: Target viral genome RNA sequence
ccagaauauuucaauucagugu

SEQ ID NO: 9475 - RNA, 22 nt, Unknown
  Description of Unknown: Target viral genome RNA sequence
cuaguugugaugcaaucaugac

SEQ ID NO: 9476 - RNA, 22 nt, Unknown
  Description of Unknown: Target viral genome RNA sequence
gcuaguugugaugcaaucauga

SEQ ID NO: 9477 - RNA, 22 nt, Unknown
  Description of Unknown: Target viral genome RNA sequence
aguugugaugcaaucaugacua

SEQ ID NO: 9478 - RNA, 22 nt, Unknown
  Description of Unknown: Target viral genome RNA sequence
uaguugugaugcaaucaugacu

SEQ ID NO: 9479 - RNA, 22 nt, Unknown
  Description of Unknown: Target viral genome RNA sequence
guugugaugcaaucaugacuag

SEQ ID NO: 9480 - RNA, 22 nt, Unknown
  Description of Unknown: Target viral genome RNA sequence
gcugcugaauguacaauuuuua

SEQ ID NO: 9481 - RNA, 22 nt, Unknown
  Description of Unknown: Target viral genome RNA sequence
cugcugaauguacaauuuuuaa

SEQ ID NO: 9482 - RNA, 22 nt, Unknown
  Description of Unknown: Target viral genome RNA sequence
ugcguaaacauuucucaaugau

SEQ ID NO: 9483 - RNA, 22 nt, Unknown
  Description of Unknown: Target viral genome RNA sequence
caucacgaacgcuuucuuauua

SEQ ID NO: 9484 - RNA, 22 nt, Unknown
  Description of Unknown: Target viral genome RNA sequence
ucacgaacgcuuucuuauuaca

SEQ ID NO: 9485 - RNA, 22 nt, Unknown
  Description of Unknown: Target viral genome RNA sequence
aucacgaacgcuuucuuauuac

SEQ ID NO: 9486 - RNA, 22 nt, Unknown
  Description of Unknown: Target viral genome RNA sequence
acgaacgcuuucuuauuacaaa

SEQ ID NO: 9487 - RNA, 22 nt, Unknown
  Description of Unknown: Target viral genome RNA sequence
gaacgcuuucuuauuacaaauu

SEQ ID NO: 9488 - RNA, 22 nt, Unknown
  Description of Unknown: Target viral genome RNA sequence
cgaacgcuuucuuauuacaaau

SEQ ID NO: 9489 - RNA, 22 nt, Unknown
  Description of Unknown: Target viral genome RNA sequence
acgcuuucuuauuacaaauugg

SEQ ID NO: 9490 - RNA, 22 nt, Unknown
  Description of Unknown: Target viral genome RNA sequence
aacgcuuucuuauuacaaauug

SEQ ID NO: 9491 - RNA, 22 nt, Unknown
  Description of Unknown: Target viral genome RNA sequence
acucaucucuaugauggguuuu

SEQ ID NO: 9492 - RNA, 22 nt, Unknown
  Description of Unknown: Target viral genome RNA sequence
gacucaucucuaugauggguuu

SEQ ID NO: 9493 - RNA, 22 nt, Unknown
  Description of Unknown: Target viral genome RNA sequence
ucaucucuaugauggguuuuaa

SEQ ID NO: 9494 - RNA, 22 nt, Unknown
  Description of Unknown: Target viral genome RNA sequence
cucaucucuaugauggguuuua

SEQ ID NO: 9495 - RNA, 22 nt, Unknown
  Description of Unknown: Target viral genome RNA sequence
caucucuaugauggguuuuaaa

SEQ ID NO: 9496 - RNA, 22 nt, Unknown
  Description of Unknown: Target viral genome RNA sequence
uagaaaugcccguaaugguguu

SEQ ID NO: 9497 - RNA, 22 nt, Unknown
  Description of Unknown: Target viral genome RNA sequence
uuagaaaugcccguaauggugu

SEQ ID NO: 9498 - RNA, 22 nt, Unknown
  Description of Unknown: Target viral genome RNA sequence
uuuagaaaugcccguaauggug

SEQ ID NO: 9499 - RNA, 22 nt, Unknown
  Description of Unknown: Target viral genome RNA sequence
auuauaauuauaaauuaccaga

SEQ ID NO: 9500 - RNA, 22 nt, Unknown
  Description of Unknown: Target viral genome RNA sequence
uuauaauuauaaauuaccagau

SEQ ID NO: 9501 - RNA, 22 nt, Unknown
  Description of Unknown: Target viral genome RNA sequence
ugauuauaauuauaaauuacca

SEQ ID NO: 9502 - RNA, 22 nt, Unknown
  Description of Unknown: Target viral genome RNA sequence
gauuauaauuauaaauuaccag

SEQ ID NO: 9503 - RNA, 22 nt, Unknown
  Description of Unknown: Target viral genome RNA sequence
gcugauuauaauuauaaauuac

SEQ ID NO: 9504 - RNA, 22 nt, Unknown
  Description of Unknown: Target viral genome RNA sequence
cugauuauaauuauaaauuacc

SEQ ID NO: 9505 - RNA, 22 nt, Unknown
  Description of Unknown: Target viral genome RNA sequence
uauaauuauaaauuaccagaug

SEQ ID NO: 9506 - RNA, 22 nt, Unknown
  Description of Unknown: Target viral genome RNA sequence
auaauuauaaauuaccagauga

SEQ ID NO: 9507 - RNA, 22 nt, Unknown
  Description of Unknown: Target viral genome RNA sequence
cugcucaaacuggaauugccgu

SEQ ID NO: 9508 - RNA, 22 nt, Unknown
  Description of Unknown: Target viral genome RNA sequence
ucugcucaaacuggaauugccg

SEQ ID NO: 9509 - RNA, 22 nt, Unknown
  Description of Unknown: Target viral genome RNA sequence
cugaaacagcucacucuuguaa

SEQ ID NO: 9510 - RNA, 22 nt, Unknown
  Description of Unknown: Target viral genome RNA sequence
cuuuugauucugaguacuguag

SEQ ID NO: 9511 - RNA, 22 nt, Unknown
  Description of Unknown: Target viral genome RNA sequence
acuuuugauucugaguacugua

SEQ ID NO: 9512 - RNA, 22 nt, Unknown
  Description of Unknown: Target viral genome RNA sequence
uuugaauguggcuaaaucugaa

SEQ ID NO: 9513 - RNA, 22 nt, Unknown
  Description of Unknown: Target viral genome RNA sequence
ugucacuaagaaaucugcugcu

SEQ ID NO: 9514 - RNA, 22 nt, Unknown
  Description of Unknown: Target viral genome RNA sequence
gcggcacaggcacuaguacuga

SEQ ID NO: 9515 - RNA, 22 nt, Unknown
  Description of Unknown: Target viral genome RNA sequence
caccgugcggcacaggcacuag

SEQ ID NO: 9516 - RNA, 22 nt, Unknown
  Description of Unknown: Target viral genome RNA sequence
accgugcggcacaggcacuagu

SEQ ID NO: 9517 - RNA, 22 nt, Unknown
  Description of Unknown: Target viral genome RNA sequence
uacaccgugcggcacaggcacu

SEQ ID NO: 9518 - RNA, 22 nt, Unknown
  Description of Unknown: Target viral genome RNA sequence
acaccgugcggcacaggcacua

SEQ ID NO: 9519 - RNA, 22 nt, Unknown
  Description of Unknown: Target viral genome RNA sequence
gugcggcacaggcacuaguacu

SEQ ID NO: 9520 - RNA, 22 nt, Unknown
  Description of Unknown: Target viral genome RNA sequence
ugcggcacaggcacuaguacug

SEQ ID NO: 9521 - RNA, 22 nt, Unknown
  Description of Unknown: Target viral genome RNA sequence
ccgugcggcacaggcacuagua

SEQ ID NO: 9522 - RNA, 22 nt, Unknown
  Description of Unknown: Target viral genome RNA sequence
cgugcggcacaggcacuaguac

SEQ ID NO: 9523 - RNA, 22 nt, Unknown
  Description of Unknown: Target viral genome RNA sequence
uugagcuuugggcuaagcgcaa

SEQ ID NO: 9524 - RNA, 22 nt, Unknown
  Description of Unknown: Target viral genome RNA sequence
uuugagcuuugggcuaagcgca

SEQ ID NO: 9525 - RNA, 22 nt, Unknown
  Description of Unknown: Target viral genome RNA sequence
uagcauuugagcuuugggcuaa

SEQ ID NO: 9526 - RNA, 22 nt, Unknown
  Description of Unknown: Target viral genome RNA sequence
guagcauuugagcuuugggcua

SEQ ID NO: 9527 - RNA, 22 nt, Unknown
  Description of Unknown: Target viral genome RNA sequence
uguagcauuugagcuuugggcu

SEQ ID NO: 9528 - RNA, 22 nt, Unknown
  Description of Unknown: Target viral genome RNA sequence
auguagcauuugagcuuugggc

SEQ ID NO: 9529 - RNA, 22 nt, Unknown
  Description of Unknown: Target viral genome RNA sequence
auuugagcuuugggcuaagcgc

SEQ ID NO: 9530 - RNA, 22 nt, Unknown
  Description of Unknown: Target viral genome RNA sequence
cauuugagcuuugggcuaagcg

SEQ ID NO: 9531 - RNA, 22 nt, Unknown
  Description of Unknown: Target viral genome RNA sequence
gcauuugagcuuugggcuaagc

SEQ ID NO: 9532 - RNA, 22 nt, Unknown
  Description of Unknown: Target viral genome RNA sequence
agcauuugagcuuugggcuaag

SEQ ID NO: 9533 - RNA, 22 nt, Unknown
  Description of Unknown: Target viral genome RNA sequence
cagaucuuaaugacuuugucuc

SEQ ID NO: 9534 - RNA, 22 nt, Unknown
  Description of Unknown: Target viral genome RNA sequence
uucagaucuuaaugacuuuguc

SEQ ID NO: 9535 - RNA, 22 nt, Unknown
  Description of Unknown: Target viral genome RNA sequence
ucagaucuuaaugacuuugucu

SEQ ID NO: 9536 - RNA, 22 nt, Unknown
  Description of Unknown: Target viral genome RNA sequence
ggaccaccugguacugguaaga

SEQ ID NO: 9537 - RNA, 22 nt, Unknown
  Description of Unknown: Target viral genome RNA sequence
cacuccagggaccaccugguac

SEQ ID NO: 9538 - RNA, 22 nt, Unknown
  Description of Unknown: Target viral genome RNA sequence
acacuccagggaccaccuggua

SEQ ID NO: 9539 - RNA, 22 nt, Unknown
  Description of Unknown: Target viral genome RNA sequence
agggaccaccugguacugguaa

SEQ ID NO: 9540 - RNA, 22 nt, Unknown
  Description of Unknown: Target viral genome RNA sequence
cagggaccaccugguacuggua

SEQ ID NO: 9541 - RNA, 22 nt, Unknown
  Description of Unknown: Target viral genome RNA sequence
ccagggaccaccugguacuggu

SEQ ID NO: 9542 - RNA, 22 nt, Unknown
  Description of Unknown: Target viral genome RNA sequence
uccagggaccaccugguacugg

SEQ ID NO: 9543 - RNA, 22 nt, Unknown
  Description of Unknown: Target viral genome RNA sequence
gugucuuuagcuauagaugcuu

SEQ ID NO: 9544 - RNA, 22 nt, Unknown
  Description of Unknown: Target viral genome RNA sequence
gucuuuagcuauagaugcuuac

SEQ ID NO: 9545 - RNA, 22 nt, Unknown
  Description of Unknown: Target viral genome RNA sequence
ugucuuuagcuauagaugcuua

SEQ ID NO: 9546 - RNA, 22 nt, Unknown
  Description of Unknown: Target viral genome RNA sequence
cuuuagcuauagaugcuuaccc

SEQ ID NO: 9547 - RNA, 22 nt, Unknown
  Description of Unknown: Target viral genome RNA sequence
ucuuuagcuauagaugcuuacc

SEQ ID NO: 9548 - RNA, 22 nt, Unknown
  Description of Unknown: Target viral genome RNA sequence
uacuagcgugccuuuguaagca

SEQ ID NO: 9549 - RNA, 22 nt, Unknown
  Description of Unknown: Target viral genome RNA sequence
cuacuagcgugccuuuguaagc

SEQ ID NO: 9550 - RNA, 22 nt, Unknown
  Description of Unknown: Target viral genome RNA sequence
cgacuacuagcgugccuuugua

SEQ ID NO: 9551 - RNA, 22 nt, Unknown
  Description of Unknown: Target viral genome RNA sequence
acgacuacuagcgugccuuugu

SEQ ID NO: 9552 - RNA, 22 nt, Unknown
  Description of Unknown: Target viral genome RNA sequence
acuacuagcgugccuuuguaag

SEQ ID NO: 9553 - RNA, 22 nt, Unknown
  Description of Unknown: Target viral genome RNA sequence
gacuacuagcgugccuuuguaa

SEQ ID NO: 9554 - RNA, 22 nt, Unknown
  Description of Unknown: Target viral genome RNA sequence
acgacgacuacuagcgugccuu

SEQ ID NO: 9555 - RNA, 22 nt, Unknown
  Description of Unknown: Target viral genome RNA sequence
gacgacgacuacuagcgugccu

SEQ ID NO: 9556 - RNA, 22 nt, Unknown
  Description of Unknown: Target viral genome RNA sequence
gacgacuacuagcgugccuuug

SEQ ID NO: 9557 - RNA, 22 nt, Unknown
  Description of Unknown: Target viral genome RNA sequence
cgacgacuacuagcgugccuuu

SEQ ID NO: 9558 - RNA, 22 nt, Unknown
  Description of Unknown: Target viral genome RNA sequence
ugggcuauauaaacguuuucgc

SEQ ID NO: 9559 - RNA, 22 nt, Unknown
  Description of Unknown: Target viral genome RNA sequence
gaugggcuauauaaacguuuuc

SEQ ID NO: 9560 - RNA, 22 nt, Unknown
  Description of Unknown: Target viral genome RNA sequence
augggcuauauaaacguuuucg

SEQ ID NO: 9561 - RNA, 22 nt, Unknown
  Description of Unknown: Target viral genome RNA sequence
cuaaauugugggcucaaugugu

SEQ ID NO: 9562 - RNA, 22 nt, Unknown
  Description of Unknown: Target viral genome RNA sequence
aguugcaccagguacagcuguu

SEQ ID NO: 9563 - RNA, 22 nt, Unknown
  Description of Unknown: Target viral genome RNA sequence
gaguugcaccagguacagcugu

SEQ ID NO: 9564 - RNA, 22 nt, Unknown
  Description of Unknown: Target viral genome RNA sequence
ggaguugcaccagguacagcug

SEQ ID NO: 9565 - RNA, 22 nt, Unknown
  Description of Unknown: Target viral genome RNA sequence
guugggauuauccuaaauguga

SEQ ID NO: 9566 - RNA, 22 nt, Unknown
  Description of Unknown: Target viral genome RNA sequence
cuuauggguugggauuauccua

SEQ ID NO: 9567 - RNA, 22 nt, Unknown
  Description of Unknown: Target viral genome RNA sequence
ccuuauggguugggauuauccu

SEQ ID NO: 9568 - RNA, 22 nt, Unknown
  Description of Unknown: Target viral genome RNA sequence
uauggguugggauuauccuaaa

SEQ ID NO: 9569 - RNA, 22 nt, Unknown
  Description of Unknown: Target viral genome RNA sequence
uuauggguugggauuauccuaa

SEQ ID NO: 9570 - RNA, 22 nt, Unknown
  Description of Unknown: Target viral genome RNA sequence
uggguugggauuauccuaaaug

SEQ ID NO: 9571 - RNA, 22 nt, Unknown
  Description of Unknown: Target viral genome RNA sequence
auggguugggauuauccuaaau

SEQ ID NO: 9572 - RNA, 22 nt, Unknown
  Description of Unknown: Target viral genome RNA sequence
gguugggauuauccuaaaugug

SEQ ID NO: 9573 - RNA, 22 nt, Unknown
  Description of Unknown: Target viral genome RNA sequence
ggguugggauuauccuaaaugu

SEQ ID NO: 9574 - RNA, 22 nt, Unknown
  Description of Unknown: Target viral genome RNA sequence
cguuguccugcugaaauuguug

SEQ ID NO: 9575 - RNA, 22 nt, Unknown
  Description of Unknown: Target viral genome RNA sequence
caagaugcacuuuucgcauaua

SEQ ID NO: 9576 - RNA, 22 nt, Unknown
  Description of Unknown: Target viral genome RNA sequence
ucaagaugcacuuuucgcauau

SEQ ID NO: 9577 - RNA, 22 nt, Unknown
  Description of Unknown: Target viral genome RNA sequence
gaggaucaagaugcacuuuucg

SEQ ID NO: 9578 - RNA, 22 nt, Unknown
  Description of Unknown: Target viral genome RNA sequence
ugaggaucaagaugcacuuuuc

SEQ ID NO: 9579 - RNA, 22 nt, Unknown
  Description of Unknown: Target viral genome RNA sequence
augaggaucaagaugcacuuuu

SEQ ID NO: 9580 - RNA, 22 nt, Unknown
  Description of Unknown: Target viral genome RNA sequence
uaugaggaucaagaugcacuuu

SEQ ID NO: 9581 - RNA, 22 nt, Unknown
  Description of Unknown: Target viral genome RNA sequence
aucaagaugcacuuuucgcaua

SEQ ID NO: 9582 - RNA, 22 nt, Unknown
  Description of Unknown: Target viral genome RNA sequence
gaucaagaugcacuuuucgcau

SEQ ID NO: 9583 - RNA, 22 nt, Unknown
  Description of Unknown: Target viral genome RNA sequence
ggaucaagaugcacuuuucgca

SEQ ID NO: 9584 - RNA, 22 nt, Unknown
  Description of Unknown: Target viral genome RNA sequence
aggaucaagaugcacuuuucgc

SEQ ID NO: 9585 - RNA, 22 nt, Unknown
  Description of Unknown: Target viral genome RNA sequence
caugguggacagccuuuguuac

SEQ ID NO: 9586 - RNA, 22 nt, Unknown
  Description of Unknown: Target viral genome RNA sequence
ugcgucuugguucaccgcucuc

SEQ ID NO: 9587 - RNA, 22 nt, Unknown
  Description of Unknown: Target viral genome RNA sequence
auacugcgucuugguucaccgc

SEQ ID NO: 9588 - RNA, 22 nt, Unknown
  Description of Unknown: Target viral genome RNA sequence
uacugcgucuugguucaccgcu

SEQ ID NO: 9589 - RNA, 22 nt, Unknown
  Description of Unknown: Target viral genome RNA sequence
acugcgucuugguucaccgcuc

SEQ ID NO: 9590 - RNA, 22 nt, Unknown
  Description of Unknown: Target viral genome RNA sequence
aauaauacugcgucuugguuca

SEQ ID NO: 9591 - RNA, 22 nt, Unknown
  Description of Unknown: Target viral genome RNA sequence
auaauacugcgucuugguucac

SEQ ID NO: 9592 - RNA, 22 nt, Unknown
  Description of Unknown: Target viral genome RNA sequence
uaauacugcgucuugguucacc

SEQ ID NO: 9593 - RNA, 22 nt, Unknown
  Description of Unknown: Target viral genome RNA sequence
aauacugcgucuugguucaccg

SEQ ID NO: 9594 - RNA, 22 nt, Unknown
  Description of Unknown: Target viral genome RNA sequence
gcucucacucaacauggcaagg

SEQ ID NO: 9595 - RNA, 22 nt, Unknown
  Description of Unknown: Target viral genome RNA sequence
cucucacucaacauggcaagga

SEQ ID NO: 9596 - RNA, 22 nt, Unknown
  Description of Unknown: Target viral genome RNA sequence
uugcaaugcuccagguugugau

SEQ ID NO: 9597 - RNA, 22 nt, Unknown
  Description of Unknown: Target viral genome RNA sequence
ugcaaugcuccagguugugaug

SEQ ID NO: 9598 - RNA, 22 nt, Unknown
  Description of Unknown: Target viral genome RNA sequence
uguuugcaaugcuccagguugu

SEQ ID NO: 9599 - RNA, 22 nt, Unknown
  Description of Unknown: Target viral genome RNA sequence
uauuucauaacagaugcgcaaa

SEQ ID NO: 9600 - RNA, 22 nt, Unknown
  Description of Unknown: Target viral genome RNA sequence
uauguuugcaaugcuccagguu

SEQ ID NO: 9601 - RNA, 22 nt, Unknown
  Description of Unknown: Target viral genome RNA sequence
uguuagacaaugcucagguguu

SEQ ID NO: 9602 - RNA, 22 nt, Unknown
  Description of Unknown: Target viral genome RNA sequence
uuguuagacaaugcucaggugu

SEQ ID NO: 9603 - RNA, 22 nt, Unknown
  Description of Unknown: Target viral genome RNA sequence
uuagacaaugcucagguguuac

SEQ ID NO: 9604 - RNA, 22 nt, Unknown
  Description of Unknown: Target viral genome RNA sequence
guuagacaaugcucagguguua

SEQ ID NO: 9605 - RNA, 22 nt, Unknown
  Description of Unknown: Target viral genome RNA sequence
auguuguuagacaaugcucagg

SEQ ID NO: 9606 - RNA, 22 nt, Unknown
  Description of Unknown: Target viral genome RNA sequence
gauguuguuagacaaugcucag

SEQ ID NO: 9607 - RNA, 22 nt, Unknown
  Description of Unknown: Target viral genome RNA sequence
guuguuagacaaugcucaggug

SEQ ID NO: 9608 - RNA, 22 nt, Unknown
  Description of Unknown: Target viral genome RNA sequence
uguuguuagacaaugcucaggu

SEQ ID NO: 9609 - RNA, 22 nt, Unknown
  Description of Unknown: Target viral genome RNA sequence
uagaauggaaguucuaugaugc

SEQ ID NO: 9610 - RNA, 22 nt, Unknown
  Description of Unknown: Target viral genome RNA sequence
guagaauggaaguucuaugaug

SEQ ID NO: 9611 - RNA, 22 nt, Unknown
  Description of Unknown: Target viral genome RNA sequence
aacugguaugauuucggugauu

SEQ ID NO: 9612 - RNA, 22 nt, Unknown
  Description of Unknown: Target viral genome RNA sequence
cugauguagaauggaaguucua

SEQ ID NO: 9613 - RNA, 22 nt, Unknown
  Description of Unknown: Target viral genome RNA sequence
gcugauguagaauggaaguucu

SEQ ID NO: 9614 - RNA, 22 nt, Unknown
  Description of Unknown: Target viral genome RNA sequence
gcuuugcuuguacaguaaguga

SEQ ID NO: 9615 - RNA, 22 nt, Unknown
  Description of Unknown: Target viral genome RNA sequence
cuuugcuuguacaguaagugac

SEQ ID NO: 9616 - RNA, 22 nt, Unknown
  Description of Unknown: Target viral genome RNA sequence
uauugcuuugcuuguacaguaa

SEQ ID NO: 9617 - RNA, 22 nt, Unknown
  Description of Unknown: Target viral genome RNA sequence
auugcuuugcuuguacaguaag

SEQ ID NO: 9618 - RNA, 22 nt, Unknown
  Description of Unknown: Target viral genome RNA sequence
uugcuuugcuuguacaguaagu

SEQ ID NO: 9619 - RNA, 22 nt, Unknown
  Description of Unknown: Target viral genome RNA sequence
ugcuuugcuuguacaguaagug

SEQ ID NO: 9620 - RNA, 22 nt, Unknown
  Description of Unknown: Target viral genome RNA sequence
acaauauugcuuugcuuguaca

SEQ ID NO: 9621 - RNA, 22 nt, Unknown
  Description of Unknown: Target viral genome RNA sequence
caauauugcuuugcuuguacag

SEQ ID NO: 9622 - RNA, 22 nt, Unknown
  Description of Unknown: Target viral genome RNA sequence
aauauugcuuugcuuguacagu

SEQ ID NO: 9623 - RNA, 22 nt, Unknown
  Description of Unknown: Target viral genome RNA sequence
auauugcuuugcuuguacagua

SEQ ID NO: 9624 - RNA, 22 nt, Unknown
  Description of Unknown: Target viral genome RNA sequence
agugauguucuuguuaacaacu

SEQ ID NO: 9625 - RNA, 22 nt, Unknown
  Description of Unknown: Target viral genome RNA sequence
gugauguucuuguuaacaacua

SEQ ID NO: 9626 - RNA, 22 nt, Unknown
  Description of Unknown: Target viral genome RNA sequence
uuucuagugauguucuuguuaa

SEQ ID NO: 9627 - RNA, 22 nt, Unknown
  Description of Unknown: Target viral genome RNA sequence
uucuagugauguucuuguuaac

SEQ ID NO: 9628 - RNA, 22 nt, Unknown
  Description of Unknown: Target viral genome RNA sequence
ucuagugauguucuuguuaaca

SEQ ID NO: 9629 - RNA, 22 nt, Unknown
  Description of Unknown: Target viral genome RNA sequence
gauacaagccucacucccuuuc

SEQ ID NO: 9630 - RNA, 22 nt, Unknown
  Description of Unknown: Target viral genome RNA sequence
uaccgauacaagccucacuccc

SEQ ID NO: 9631 - RNA, 22 nt, Unknown
  Description of Unknown: Target viral genome RNA sequence
auaccgauacaagccucacucc

SEQ ID NO: 9632 - RNA, 22 nt, Unknown
  Description of Unknown: Target viral genome RNA sequence
ccgauacaagccucacucccuu

SEQ ID NO: 9633 - RNA, 22 nt, Unknown
  Description of Unknown: Target viral genome RNA sequence
acgauaccgauacaagccucac

SEQ ID NO: 9634 - RNA, 22 nt, Unknown
  Description of Unknown: Target viral genome RNA sequence
aacgauaccgauacaagccuca

SEQ ID NO: 9635 - RNA, 22 nt, Unknown
  Description of Unknown: Target viral genome RNA sequence
gauaccgauacaagccucacuc

SEQ ID NO: 9636 - RNA, 22 nt, Unknown
  Description of Unknown: Target viral genome RNA sequence
cgauaccgauacaagccucacu

SEQ ID NO: 9637 - RNA, 22 nt, Unknown
  Description of Unknown: Target viral genome RNA sequence
gacuuuaaccuuguggcuauga

SEQ ID NO: 9638 - RNA, 22 nt, Unknown
  Description of Unknown: Target viral genome RNA sequence
ugacuuuaaccuuguggcuaug

SEQ ID NO: 9639 - RNA, 22 nt, Unknown
  Description of Unknown: Target viral genome RNA sequence
cuuuaaccuuguggcuaugaag

SEQ ID NO: 9640 - RNA, 22 nt, Unknown
  Description of Unknown: Target viral genome RNA sequence
acuuuaaccuuguggcuaugaa

SEQ ID NO: 9641 - RNA, 22 nt, Unknown
  Description of Unknown: Target viral genome RNA sequence
uuaaugacuuuaaccuuguggc

SEQ ID NO: 9642 - RNA, 22 nt, Unknown
  Description of Unknown: Target viral genome RNA sequence
augacuuuaaccuuguggcuau

SEQ ID NO: 9643 - RNA, 22 nt, Unknown
  Description of Unknown: Target viral genome RNA sequence
aaugacuuuaaccuuguggcua

SEQ ID NO: 9644 - RNA, 22 nt, Unknown
  Description of Unknown: Target viral genome RNA sequence
uuaaccuuguggcuaugaagua

SEQ ID NO: 9645 - RNA, 22 nt, Unknown
  Description of Unknown: Target viral genome RNA sequence
uuuaaccuuguggcuaugaagu

SEQ ID NO: 9646 - RNA, 22 nt, Unknown
  Description of Unknown: Target viral genome RNA sequence
ggccaacaacaacaaggccaaa

SEQ ID NO: 9647 - RNA, 22 nt, Unknown
  Description of Unknown: Target viral genome RNA sequence
gccaacaacaacaaggccaaac

SEQ ID NO: 9648 - RNA, 22 nt, Unknown
  Description of Unknown: Target viral genome RNA sequence
ccaacaacaacaaggccaaacu

SEQ ID NO: 9649 - RNA, 22 nt, Unknown
  Description of Unknown: Target viral genome RNA sequence
caacaacaacaaggccaaacug

SEQ ID NO: 9650 - RNA, 22 nt, Unknown
  Description of Unknown: Target viral genome RNA sequence
aacaacaacaaggccaaacugu

SEQ ID NO: 9651 - RNA, 22 nt, Unknown
  Description of Unknown: Target viral genome RNA sequence
caacaacaaggccaaacuguca

SEQ ID NO: 9652 - RNA, 22 nt, Unknown
  Description of Unknown: Target viral genome RNA sequence
aacaacaaggccaaacugucac

SEQ ID NO: 9653 - RNA, 22 nt, Unknown
  Description of Unknown: Target viral genome RNA sequence
acaacaaggccaaacugucacu

SEQ ID NO: 9654 - RNA, 22 nt, Unknown
  Description of Unknown: Target viral genome RNA sequence
caacaaggccaaacugucacua

SEQ ID NO: 9655 - RNA, 22 nt, Unknown
  Description of Unknown: Target viral genome RNA sequence
gacucaagcuuuuugcagcaga

SEQ ID NO: 9656 - RNA, 22 nt, Unknown
  Description of Unknown: Target viral genome RNA sequence
agacucaagcuuuuugcagcag

SEQ ID NO: 9657 - RNA, 22 nt, Unknown
  Description of Unknown: Target viral genome RNA sequence
acucaagcuuuuugcagcagaa

SEQ ID NO: 9658 - RNA, 22 nt, Unknown
  Description of Unknown: Target viral genome RNA sequence
gaugcuuacccacuuacuaaac

SEQ ID NO: 9659 - RNA, 22 nt, Unknown
  Description of Unknown: Target viral genome RNA sequence
augcuuacccacuuacuaaaca

SEQ ID NO: 9660 - RNA, 22 nt, Unknown
  Description of Unknown: Target viral genome RNA sequence
uuauggauuuguuuaugagaau

SEQ ID NO: 9661 - RNA, 22 nt, Unknown
  Description of Unknown: Target viral genome RNA sequence
ggagagcugccuauauggaaga

SEQ ID NO: 9662 - RNA, 22 nt, Unknown
  Description of Unknown: Target viral genome RNA sequence
gagagcugccuauauggaagag

SEQ ID NO: 9663 - RNA, 22 nt, Unknown
  Description of Unknown: Target viral genome RNA sequence
ugaccgugaugcagccaugcaa

SEQ ID NO: 9664 - RNA, 22 nt, Unknown
  Description of Unknown: Target viral genome RNA sequence
gaccgugaugcagccaugcaac

SEQ ID NO: 9665 - RNA, 22 nt, Unknown
  Description of Unknown: Target viral genome RNA sequence
accgugaugcagccaugcaacg

SEQ ID NO: 9666 - RNA, 22 nt, Unknown
  Description of Unknown: Target viral genome RNA sequence
uccagaugaccaaauuggcuac

SEQ ID NO: 9667 - RNA, 22 nt, Unknown
  Description of Unknown: Target viral genome RNA sequence
ccagaugaccaaauuggcuacu

SEQ ID NO: 9668 - RNA, 22 nt, Unknown
  Description of Unknown: Target viral genome RNA sequence
aguccagaugaccaaauuggcu

SEQ ID NO: 9669 - RNA, 22 nt, Unknown
  Description of Unknown: Target viral genome RNA sequence
guccagaugaccaaauuggcua

SEQ ID NO: 9670 - RNA, 22 nt, Unknown
  Description of Unknown: Target viral genome RNA sequence
aagcugcuaacuuuugugcacu

SEQ ID NO: 9671 - RNA, 22 nt, Unknown
  Description of Unknown: Target viral genome RNA sequence
gcugcuaacuuuugugcacuua

SEQ ID NO: 9672 - RNA, 22 nt, Unknown
  Description of Unknown: Target viral genome RNA sequence
cugcuaacuuuugugcacuuau

SEQ ID NO: 9673 - RNA, 22 nt, Unknown
  Description of Unknown: Target viral genome RNA sequence
ggugaagcugcuaacuuuugug

SEQ ID NO: 9674 - RNA, 22 nt, Unknown
  Description of Unknown: Target viral genome RNA sequence
gugaagcugcuaacuuuugugc

SEQ ID NO: 9675 - RNA, 22 nt, Unknown
  Description of Unknown: Target viral genome RNA sequence
ugaagcugcuaacuuuugugca

SEQ ID NO: 9676 - RNA, 22 nt, Unknown
  Description of Unknown: Target viral genome RNA sequence
gaagcugcuaacuuuugugcac

SEQ ID NO: 9677 - RNA, 22 nt, Unknown
  Description of Unknown: Target viral genome RNA sequence
auaggagaguacaccuuugaaa

SEQ ID NO: 9678 - RNA, 22 nt, Unknown
  Description of Unknown: Target viral genome RNA sequence
aaaggugacuauggugaugcug

SEQ ID NO: 9679 - RNA, 22 nt, Unknown
  Description of Unknown: Target viral genome RNA sequence
aaggugacuauggugaugcugu

SEQ ID NO: 9680 - RNA, 22 nt, Unknown
  Description of Unknown: Target viral genome RNA sequence
aggugacuauggugaugcuguu

SEQ ID NO: 9681 - RNA, 22 nt, Unknown
  Description of Unknown: Target viral genome RNA sequence
ggugacuauggugaugcuguug

SEQ ID NO: 9682 - RNA, 22 nt, Unknown
  Description of Unknown: Target viral genome RNA sequence
gugacuauggugaugcuguugu

SEQ ID NO: 9683 - RNA, 22 nt, Unknown
  Description of Unknown: Target viral genome RNA sequence
uugauaaauucaaagugaauuc

SEQ ID NO: 9684 - RNA, 22 nt, Unknown
  Description of Unknown: Target viral genome RNA sequence
ugauaaauucaaagugaauuca

SEQ ID NO: 9685 - RNA, 22 nt, Unknown
  Description of Unknown: Target viral genome RNA sequence
gauaaauucaaagugaauucaa

SEQ ID NO: 9686 - RNA, 22 nt, Unknown
  Description of Unknown: Target viral genome RNA sequence
auaaauucaaagugaauucaac

SEQ ID NO: 9687 - RNA, 22 nt, Unknown
  Description of Unknown: Target viral genome RNA sequence
uguuuugauaaauucaaaguga

SEQ ID NO: 9688 - RNA, 22 nt, Unknown
  Description of Unknown: Target viral genome RNA sequence
guuuugauaaauucaaagugaa

SEQ ID NO: 9689 - RNA, 22 nt, Unknown
  Description of Unknown: Target viral genome RNA sequence
uuuugauaaauucaaagugaau

SEQ ID NO: 9690 - RNA, 22 nt, Unknown
  Description of Unknown: Target viral genome RNA sequence
uuugauaaauucaaagugaauu

SEQ ID NO: 9691 - RNA, 22 nt, Unknown
  Description of Unknown: Target viral genome RNA sequence
uaaauucaaagugaauucaaca

SEQ ID NO: 9692 - RNA, 22 nt, Unknown
  Description of Unknown: Target viral genome RNA sequence
aaauucaaagugaauucaacau

SEQ ID NO: 9693 - RNA, 22 nt, Unknown
  Description of Unknown: Target viral genome RNA sequence
ugguuuuaauuuuucacaaaua

SEQ ID NO: 9694 - RNA, 22 nt, Unknown
  Description of Unknown: Target viral genome RNA sequence
gugguuuuaauuuuucacaaau

SEQ ID NO: 9695 - RNA, 22 nt, Unknown
  Description of Unknown: Target viral genome RNA sequence
guuuuaauuuuucacaaauauu

SEQ ID NO: 9696 - RNA, 22 nt, Unknown
  Description of Unknown: Target viral genome RNA sequence
uaauuuuucacaaauauuacca

SEQ ID NO: 9697 - RNA, 22 nt, Unknown
  Description of Unknown: Target viral genome RNA sequence
auuuuucacaaauauuaccaga

SEQ ID NO: 9698 - RNA, 22 nt, Unknown
  Description of Unknown: Target viral genome RNA sequence
aauuuuucacaaauauuaccag

SEQ ID NO: 9699 - RNA, 22 nt, Unknown
  Description of Unknown: Target viral genome RNA sequence
caaacccgguaauuuuaacaaa

SEQ ID NO: 9700 - RNA, 22 nt, Unknown
  Description of Unknown: Target viral genome RNA sequence
aaacccgguaauuuuaacaaag

SEQ ID NO: 9701 - RNA, 22 nt, Unknown
  Description of Unknown: Target viral genome RNA sequence
cugucaaacccgguaauuuuaa

SEQ ID NO: 9702 - RNA, 22 nt, Unknown
  Description of Unknown: Target viral genome RNA sequence
ugucaaacccgguaauuuuaac

SEQ ID NO: 9703 - RNA, 22 nt, Unknown
  Description of Unknown: Target viral genome RNA sequence
gucaaacccgguaauuuuaaca

SEQ ID NO: 9704 - RNA, 22 nt, Unknown
  Description of Unknown: Target viral genome RNA sequence
ucaaacccgguaauuuuaacaa

SEQ ID NO: 9705 - RNA, 22 nt, Unknown
  Description of Unknown: Target viral genome RNA sequence
caaacugucaaacccgguaauu

SEQ ID NO: 9706 - RNA, 22 nt, Unknown
  Description of Unknown: Target viral genome RNA sequence
aaacugucaaacccgguaauuu

SEQ ID NO: 9707 - RNA, 22 nt, Unknown
  Description of Unknown: Target viral genome RNA sequence
aacugucaaacccgguaauuuu

SEQ ID NO: 9708 - RNA, 22 nt, Unknown
  Description of Unknown: Target viral genome RNA sequence
acugucaaacccgguaauuuua

SEQ ID NO: 9709 - RNA, 22 nt, Unknown
  Description of Unknown: Target viral genome RNA sequence
uaaagauaacagaacauucuug

SEQ ID NO: 9710 - RNA, 22 nt, Unknown
  Description of Unknown: Target viral genome RNA sequence
uugccguuuuagauaugugugc

SEQ ID NO: 9711 - RNA, 22 nt, Unknown
  Description of Unknown: Target viral genome RNA sequence
uguuacaaugguucaccaucug

SEQ ID NO: 9712 - RNA, 22 nt, Unknown
  Description of Unknown: Target viral genome RNA sequence
acuuaggcgacgagcuuggcac

SEQ ID NO: 9713 - RNA, 22 nt, Unknown
  Description of Unknown: Target viral genome RNA sequence
cuuaggcgacgagcuuggcacu

SEQ ID NO: 9714 - RNA, 22 nt, Unknown
  Description of Unknown: Target viral genome RNA sequence
gacuuaggcgacgagcuuggca

SEQ ID NO: 9715 - RNA, 22 nt, Unknown
  Description of Unknown: Target viral genome RNA sequence
aucguuuuuaaacggguuugcg

SEQ ID NO: 9716 - RNA, 22 nt, Unknown
  Description of Unknown: Target viral genome RNA sequence
caugcagggugcuguagacaua

SEQ ID NO: 9717 - RNA, 22 nt, Unknown
  Description of Unknown: Target viral genome RNA sequence
ccaugcagggugcuguagacau

SEQ ID NO: 9718 - RNA, 22 nt, Unknown
  Description of Unknown: Target viral genome RNA sequence
uuuccaugcagggugcuguaga

SEQ ID NO: 9719 - RNA, 22 nt, Unknown
  Description of Unknown: Target viral genome RNA sequence
cuuuccaugcagggugcuguag

SEQ ID NO: 9720 - RNA, 22 nt, Unknown
  Description of Unknown: Target viral genome RNA sequence
uccaugcagggugcuguagaca

SEQ ID NO: 9721 - RNA, 22 nt, Unknown
  Description of Unknown: Target viral genome RNA sequence
uuccaugcagggugcuguagac

SEQ ID NO: 9722 - RNA, 22 nt, Unknown
  Description of Unknown: Target viral genome RNA sequence
uugcuuuccaugcagggugcug

SEQ ID NO: 9723 - RNA, 22 nt, Unknown
  Description of Unknown: Target viral genome RNA sequence
uuugcuuuccaugcagggugcu

SEQ ID NO: 9724 - RNA, 22 nt, Unknown
  Description of Unknown: Target viral genome RNA sequence
gcuuuccaugcagggugcugua

SEQ ID NO: 9725 - RNA, 22 nt, Unknown
  Description of Unknown: Target viral genome RNA sequence
ugcuuuccaugcagggugcugu

SEQ ID NO: 9726 - RNA, 22 nt, Unknown
  Description of Unknown: Target viral genome RNA sequence
agugaaauggucauguguggcg

SEQ ID NO: 9727 - RNA, 22 nt, Unknown
  Description of Unknown: Target viral genome RNA sequence
uuugguggacccucagauucaa

SEQ ID NO: 9728 - RNA, 22 nt, Unknown
  Description of Unknown: Target viral genome RNA sequence
auuauaaauuaccagaugauuu

SEQ ID NO: 9729 - RNA, 22 nt, Unknown
  Description of Unknown: Target viral genome RNA sequence
cgcugugacaucaaggaccugc

SEQ ID NO: 9730 - RNA, 22 nt, Unknown
  Description of Unknown: Target viral genome RNA sequence
gcugugacaucaaggaccugcc

SEQ ID NO: 9731 - RNA, 22 nt, Unknown
  Description of Unknown: Target viral genome RNA sequence
acaaugcuuuucacuaugcuua

SEQ ID NO: 9732 - RNA, 22 nt, Unknown
  Description of Unknown: Target viral genome RNA sequence
caaugcuuuucacuaugcuuag

SEQ ID NO: 9733 - RNA, 22 nt, Unknown
  Description of Unknown: Target viral genome RNA sequence
guuaauagcguacuucuuuuuc

SEQ ID NO: 9734 - RNA, 22 nt, Unknown
  Description of Unknown: Target viral genome RNA sequence
aguuaauagcguacuucuuuuu

SEQ ID NO: 9735 - RNA, 22 nt, Unknown
  Description of Unknown: Target viral genome RNA sequence
uaauagcguacuucuuuuucuu

SEQ ID NO: 9736 - RNA, 22 nt, Unknown
  Description of Unknown: Target viral genome RNA sequence
uuaauagcguacuucuuuuucu

SEQ ID NO: 9737 - RNA, 22 nt, Unknown
  Description of Unknown: Target viral genome RNA sequence
auagcguacuucuuuuucuugc

SEQ ID NO: 9738 - RNA, 22 nt, Unknown
  Description of Unknown: Target viral genome RNA sequence
aauagcguacuucuuuuucuug

SEQ ID NO: 9739 - RNA, 22 nt, Unknown
  Description of Unknown: Target viral genome RNA sequence
agcguacuucuuuuucuugcuu

SEQ ID NO: 9740 - RNA, 22 nt, Unknown
  Description of Unknown: Target viral genome RNA sequence
uagcguacuucuuuuucuugcu

SEQ ID NO: 9741 - RNA, 22 nt, Unknown
  Description of Unknown: Target viral genome RNA sequence
cguacuucuuuuucuugcuuuc

SEQ ID NO: 9742 - RNA, 22 nt, Unknown
  Description of Unknown: Target viral genome RNA sequence
gcguacuucuuuuucuugcuuu

SEQ ID NO: 9743 - RNA, 22 nt, Unknown
  Description of Unknown: Target viral genome RNA sequence
aggaguugcaccagguacagcu

SEQ ID NO: 9744 - RNA, 22 nt, Unknown
  Description of Unknown: Target viral genome RNA sequence
gcagaggcggcagucaagccuc

SEQ ID NO: 9745 - RNA, 22 nt, Unknown
  Description of Unknown: Target viral genome RNA sequence
cagaggcggcagucaagccucu

SEQ ID NO: 9746 - RNA, 22 nt, Unknown
  Description of Unknown: Target viral genome RNA sequence
gagcagaggcggcagucaagcc

SEQ ID NO: 9747 - RNA, 22 nt, Unknown
  Description of Unknown: Target viral genome RNA sequence
agcagaggcggcagucaagccu

SEQ ID NO: 9748 - RNA, 22 nt, Unknown
  Description of Unknown: Target viral genome RNA sequence
gggagcagaggcggcagucaag

SEQ ID NO: 9749 - RNA, 22 nt, Unknown
  Description of Unknown: Target viral genome RNA sequence
agaggcggcagucaagccucuu

SEQ ID NO: 9750 - RNA, 22 nt, Unknown
  Description of Unknown: Target viral genome RNA sequence
gaggcggcagucaagccucuuc

SEQ ID NO: 9751 - RNA, 22 nt, Unknown
  Description of Unknown: Target viral genome RNA sequence
aucagagcuucugcuaaucuug

SEQ ID NO: 9752 - RNA, 22 nt, Unknown
  Description of Unknown: Target viral genome RNA sequence
aaucagagcuucugcuaaucuu

SEQ ID NO: 9753 - RNA, 22 nt, Unknown
  Description of Unknown: Target viral genome RNA sequence
aaacccaaggaaauuuugggga

SEQ ID NO: 9754 - RNA, 22 nt, Unknown
  Description of Unknown: Target viral genome RNA sequence
aaaucagagcuucugcuaaucu

SEQ ID NO: 9755 - RNA, 22 nt, Unknown
  Description of Unknown: Target viral genome RNA sequence
gaaaucagagcuucugcuaauc

SEQ ID NO: 9756 - RNA, 22 nt, Unknown
  Description of Unknown: Target viral genome RNA sequence
uccagaacaaacccaaggaaau

SEQ ID NO: 9757 - RNA, 22 nt, Unknown
  Description of Unknown: Target viral genome RNA sequence
ccagaacaaacccaaggaaauu

SEQ ID NO: 9758 - RNA, 22 nt, Unknown
  Description of Unknown: Target viral genome RNA sequence
cagaacaaacccaaggaaauuu

SEQ ID NO: 9759 - RNA, 22 nt, Unknown
  Description of Unknown: Target viral genome RNA sequence
agaacaaacccaaggaaauuuu

SEQ ID NO: 9760 - RNA, 22 nt, Unknown
  Description of Unknown: Target viral genome RNA sequence
gaacaaacccaaggaaauuuug

SEQ ID NO: 9761 - RNA, 22 nt, Unknown
  Description of Unknown: Target viral genome RNA sequence
aacaaacccaaggaaauuuugg

SEQ ID NO: 9762 - RNA, 22 nt, Unknown
  Description of Unknown: Target viral genome RNA sequence
acaaacccaaggaaauuuuggg

SEQ ID NO: 9763 - RNA, 22 nt, Unknown
  Description of Unknown: Target viral genome RNA sequence
caaacccaaggaaauuuugggg

SEQ ID NO: 9764 - RNA, 22 nt, Unknown
  Description of Unknown: Target viral genome RNA sequence
aauucaguguguagacuuauga

SEQ ID NO: 9765 - RNA, 22 nt, Unknown
  Description of Unknown: Target viral genome RNA sequence
acaacucuggaagaaacuaagu

SEQ ID NO: 9766 - RNA, 22 nt, Unknown
  Description of Unknown: Target viral genome RNA sequence
caacucuggaagaaacuaaguu

SEQ ID NO: 9767 - RNA, 22 nt, Unknown
  Description of Unknown: Target viral genome RNA sequence
acuguugauucaucacagggcu

SEQ ID NO: 9768 - RNA, 22 nt, Unknown
  Description of Unknown: Target viral genome RNA sequence
cacuacgacagaugucuugugc

SEQ ID NO: 9769 - RNA, 22 nt, Unknown
  Description of Unknown: Target viral genome RNA sequence
ggaguaugcugaugucuuucau

SEQ ID NO: 9770 - RNA, 22 nt, Unknown
  Description of Unknown: Target viral genome RNA sequence
gaguaugcugaugucuuucauu

SEQ ID NO: 9771 - RNA, 22 nt, Unknown
  Description of Unknown: Target viral genome RNA sequence
aguaugcugaugucuuucauuu

SEQ ID NO: 9772 - RNA, 22 nt, Unknown
  Description of Unknown: Target viral genome RNA sequence
guaugcugaugucuuucauuug

SEQ ID NO: 9773 - RNA, 22 nt, Unknown
  Description of Unknown: Target viral genome RNA sequence
augcugaugucuuucauuugua

SEQ ID NO: 9774 - RNA, 22 nt, Unknown
  Description of Unknown: Target viral genome RNA sequence
acaauggaaccuaguaauaggu

SEQ ID NO: 9775 - RNA, 22 nt, Unknown
  Description of Unknown: Target viral genome RNA sequence
gaacaauggaaccuaguaauag

SEQ ID NO: 9776 - RNA, 22 nt, Unknown
  Description of Unknown: Target viral genome RNA sequence
aacaauggaaccuaguaauagg

SEQ ID NO: 9777 - RNA, 22 nt, Unknown
  Description of Unknown: Target viral genome RNA sequence
uggaaccuaguaauagguuucc

SEQ ID NO: 9778 - RNA, 22 nt, Unknown
  Description of Unknown: Target viral genome RNA sequence
ggaaccuaguaauagguuuccu

SEQ ID NO: 9779 - RNA, 22 nt, Unknown
  Description of Unknown: Target viral genome RNA sequence
aauggaaccuaguaauagguuu

SEQ ID NO: 9780 - RNA, 22 nt, Unknown
  Description of Unknown: Target viral genome RNA sequence
gaaccuaguaauagguuuccua

SEQ ID NO: 9781 - RNA, 22 nt, Unknown
  Description of Unknown: Target viral genome RNA sequence
aaccuaguaauagguuuccuau

SEQ ID NO: 9782 - RNA, 22 nt, Unknown
  Description of Unknown: Target viral genome RNA sequence
cauguguggcgguucacuauau

SEQ ID NO: 9783 - RNA, 22 nt, Unknown
  Description of Unknown: Target viral genome RNA sequence
agacaaggaacugauuacaaac

SEQ ID NO: 9784 - RNA, 22 nt, Unknown
  Description of Unknown: Target viral genome RNA sequence
cagacaaggaacugauuacaaa

SEQ ID NO: 9785 - RNA, 22 nt, Unknown
  Description of Unknown: Target viral genome RNA sequence
ucagacaaggaacugauuacaa

SEQ ID NO: 9786 - RNA, 22 nt, Unknown
  Description of Unknown: Target viral genome RNA sequence
aucagacaaggaacugauuaca

SEQ ID NO: 9787 - RNA, 22 nt, Unknown
  Description of Unknown: Target viral genome RNA sequence
aaggaacugauuacaaacauug

SEQ ID NO: 9788 - RNA, 22 nt, Unknown
  Description of Unknown: Target viral genome RNA sequence
caaggaacugauuacaaacauu

SEQ ID NO: 9789 - RNA, 22 nt, Unknown
  Description of Unknown: Target viral genome RNA sequence
acaaggaacugauuacaaacau

SEQ ID NO: 9790 - RNA, 22 nt, Unknown
  Description of Unknown: Target viral genome RNA sequence
gacaaggaacugauuacaaaca

SEQ ID NO: 9791 - RNA, 22 nt, Unknown
  Description of Unknown: Target viral genome RNA sequence
aggaacugauuacaaacauugg

SEQ ID NO: 9792 - RNA, 22 nt, Unknown
  Description of Unknown: Target viral genome RNA sequence
ugugguaguguugguuuuaaca

SEQ ID NO: 9793 - RNA, 22 nt, Unknown
  Description of Unknown: Target viral genome RNA sequence
augugguaguguugguuuuaac

SEQ ID NO: 9794 - RNA, 22 nt, Unknown
  Description of Unknown: Target viral genome RNA sequence
caugugguaguguugguuuuaa

SEQ ID NO: 9795 - RNA, 22 nt, Unknown
  Description of Unknown: Target viral genome RNA sequence
ucaugugguaguguugguuuua

SEQ ID NO: 9796 - RNA, 22 nt, Unknown
  Description of Unknown: Target viral genome RNA sequence
guaguguugguuuuaacauaga

SEQ ID NO: 9797 - RNA, 22 nt, Unknown
  Description of Unknown: Target viral genome RNA sequence
gguaguguugguuuuaacauag

SEQ ID NO: 9798 - RNA, 22 nt, Unknown
  Description of Unknown: Target viral genome RNA sequence
ugguaguguugguuuuaacaua

SEQ ID NO: 9799 - RNA, 22 nt, Unknown
  Description of Unknown: Target viral genome RNA sequence
gugguaguguugguuuuaacau

SEQ ID NO: 9800 - RNA, 22 nt, Unknown
  Description of Unknown: Target viral genome RNA sequence
aguguugguuuuaacauagauu

SEQ ID NO: 9801 - RNA, 22 nt, Unknown
  Description of Unknown: Target viral genome RNA sequence
uaguguugguuuuaacauagau

SEQ ID NO: 9802 - RNA, 22 nt, Unknown
  Description of Unknown: Target viral genome RNA sequence
cguccgggugugaccgaaaggu

SEQ ID NO: 9803 - RNA, 22 nt, Unknown
  Description of Unknown: Target viral genome RNA sequence
guccgggugugaccgaaaggua

SEQ ID NO: 9804 - RNA, 22 nt, Unknown
  Description of Unknown: Target viral genome RNA sequence
agguuucguccgggugugaccg

SEQ ID NO: 9805 - RNA, 22 nt, Unknown
  Description of Unknown: Target viral genome RNA sequence
gguuucguccgggugugaccga

SEQ ID NO: 9806 - RNA, 22 nt, Unknown
  Description of Unknown: Target viral genome RNA sequence
cuagguuucguccgggugugac

SEQ ID NO: 9807 - RNA, 22 nt, Unknown
  Description of Unknown: Target viral genome RNA sequence
uagguuucguccgggugugacc

SEQ ID NO: 9808 - RNA, 22 nt, Unknown
  Description of Unknown: Target viral genome RNA sequence
uucguccgggugugaccgaaag

SEQ ID NO: 9809 - RNA, 22 nt, Unknown
  Description of Unknown: Target viral genome RNA sequence
ucguccgggugugaccgaaagg

SEQ ID NO: 9810 - RNA, 22 nt, Unknown
  Description of Unknown: Target viral genome RNA sequence
guuucguccgggugugaccgaa

SEQ ID NO: 9811 - RNA, 22 nt, Unknown
  Description of Unknown: Target viral genome RNA sequence
uuucguccgggugugaccgaaa

SEQ ID NO: 9812 - RNA, 22 nt, Unknown
  Description of Unknown: Target viral genome RNA sequence
acagagaauuacaucuuucaug

SEQ ID NO: 9813 - RNA, 22 nt, Unknown
  Description of Unknown: Target viral genome RNA sequence
cagagaauuacaucuuucaugg

SEQ ID NO: 9814 - RNA, 22 nt, Unknown
  Description of Unknown: Target viral genome RNA sequence
agagaauuacaucuuucauggg

SEQ ID NO: 9815 - RNA, 22 nt, Unknown
  Description of Unknown: Target viral genome RNA sequence
gagaauuacaucuuucauggga

SEQ ID NO: 9816 - RNA, 22 nt, Unknown
  Description of Unknown: Target viral genome RNA sequence
gcauaccuaaggacaugaccua

SEQ ID NO: 9817 - RNA, 22 nt, Unknown
  Description of Unknown: Target viral genome RNA sequence
ggcauaccuaaggacaugaccu

SEQ ID NO: 9818 - RNA, 22 nt, Unknown
  Description of Unknown: Target viral genome RNA sequence
uauuugccuauagauaaaugua

SEQ ID NO: 9819 - RNA, 22 nt, Unknown
  Description of Unknown: Target viral genome RNA sequence
auggagucacauuaauuggaga

SEQ ID NO: 9820 - RNA, 22 nt, Unknown
  Description of Unknown: Target viral genome RNA sequence
aauggagucacauuaauuggag

SEQ ID NO: 9821 - RNA, 22 nt, Unknown
  Description of Unknown: Target viral genome RNA sequence
ggagucacauuaauuggagaag

SEQ ID NO: 9822 - RNA, 22 nt, Unknown
  Description of Unknown: Target viral genome RNA sequence
uggagucacauuaauuggagaa

SEQ ID NO: 9823 - RNA, 22 nt, Unknown
  Description of Unknown: Target viral genome RNA sequence
uaauggagucacauuaauugga

SEQ ID NO: 9824 - RNA, 22 nt, Unknown
  Description of Unknown: Target viral genome RNA sequence
uuaauggagucacauuaauugg

SEQ ID NO: 9825 - RNA, 22 nt, Unknown
  Description of Unknown: Target viral genome RNA sequence
gagucacauuaauuggagaagc

SEQ ID NO: 9826 - RNA, 22 nt, Unknown
  Description of Unknown: Target viral genome RNA sequence
gaaguuguugauaaguacuuug

SEQ ID NO: 9827 - RNA, 22 nt, Unknown
  Description of Unknown: Target viral genome RNA sequence
guugaaguuguugauaaguacu

SEQ ID NO: 9828 - RNA, 22 nt, Unknown
  Description of Unknown: Target viral genome RNA sequence
uaguugaaguuguugauaagua

SEQ ID NO: 9829 - RNA, 22 nt, Unknown
  Description of Unknown: Target viral genome RNA sequence
aguugaaguuguugauaaguac

SEQ ID NO: 9830 - RNA, 22 nt, Unknown
  Description of Unknown: Target viral genome RNA sequence
guaguugaaguuguugauaagu

SEQ ID NO: 9831 - RNA, 22 nt, Unknown
  Description of Unknown: Target viral genome RNA sequence
uuuguaguugaaguuguugaua

SEQ ID NO: 9832 - RNA, 22 nt, Unknown
  Description of Unknown: Target viral genome RNA sequence
uuguaguugaaguuguugauaa

SEQ ID NO: 9833 - RNA, 22 nt, Unknown
  Description of Unknown: Target viral genome RNA sequence
uugcucaggaugguaaugcugc

SEQ ID NO: 9834 - RNA, 22 nt, Unknown
  Description of Unknown: Target viral genome RNA sequence
ugcucaggaugguaaugcugcu

SEQ ID NO: 9835 - RNA, 22 nt, Unknown
  Description of Unknown: Target viral genome RNA sequence
gcucaggaugguaaugcugcua

SEQ ID NO: 9836 - RNA, 22 nt, Unknown
  Description of Unknown: Target viral genome RNA sequence
cucaggaugguaaugcugcuau

SEQ ID NO: 9837 - RNA, 22 nt, Unknown
  Description of Unknown: Target viral genome RNA sequence
cuuugcucaggaugguaaugcu

SEQ ID NO: 9838 - RNA, 22 nt, Unknown
  Description of Unknown: Target viral genome RNA sequence
uuugcucaggaugguaaugcug

SEQ ID NO: 9839 - RNA, 22 nt, Unknown
  Description of Unknown: Target viral genome RNA sequence
uuaauccguauguuugcaaugc

SEQ ID NO: 9840 - RNA, 22 nt, Unknown
  Description of Unknown: Target viral genome RNA sequence
guuaauccguauguuugcaaug

SEQ ID NO: 9841 - RNA, 22 nt, Unknown
  Description of Unknown: Target viral genome RNA sequence
uguuaauccguauguuugcaau

SEQ ID NO: 9842 - RNA, 22 nt, Unknown
  Description of Unknown: Target viral genome RNA sequence
cuguuaauccguauguuugcaa

SEQ ID NO: 9843 - RNA, 22 nt, Unknown
  Description of Unknown: Target viral genome RNA sequence
ucuguuaauccguauguuugca

SEQ ID NO: 9844 - RNA, 22 nt, Unknown
  Description of Unknown: Target viral genome RNA sequence
gucuguuaauccguauguuugc

SEQ ID NO: 9845 - RNA, 22 nt, Unknown
  Description of Unknown: Target viral genome RNA sequence
auguuugcaaugcuccagguug

SEQ ID NO: 9846 - RNA, 22 nt, Unknown
  Description of Unknown: Target viral genome RNA sequence
gggugaugcguauuaugacaug

SEQ ID NO: 9847 - RNA, 22 nt, Unknown
  Description of Unknown: Target viral genome RNA sequence
ggugaugcguauuaugacaugg

SEQ ID NO: 9848 - RNA, 22 nt, Unknown
  Description of Unknown: Target viral genome RNA sequence
uuugcaaugcuccagguuguga

SEQ ID NO: 9849 - RNA, 22 nt, Unknown
  Description of Unknown: Target viral genome RNA sequence
gcuaugcaaauggcuuauaggu

SEQ ID NO: 9850 - RNA, 22 nt, Unknown
  Description of Unknown: Target viral genome RNA sequence
cuaugcaaauggcuuauagguu

SEQ ID NO: 9851 - RNA, 22 nt, Unknown
  Description of Unknown: Target viral genome RNA sequence
uugcuaugcaaauggcuuauag

SEQ ID NO: 9852 - RNA, 22 nt, Unknown
  Description of Unknown: Target viral genome RNA sequence
ugcuaugcaaauggcuuauagg

SEQ ID NO: 9853 - RNA, 22 nt, Unknown
  Description of Unknown: Target viral genome RNA sequence
ccuauguguucaucaaacguuc

SEQ ID NO: 9854 - RNA, 22 nt, Unknown
  Description of Unknown: Target viral genome RNA sequence
cccuauguguucaucaaacguu

SEQ ID NO: 9855 - RNA, 22 nt, Unknown
  Description of Unknown: Target viral genome RNA sequence
gcccuauguguucaucaaacgu

SEQ ID NO: 9856 - RNA, 22 nt, Unknown
  Description of Unknown: Target viral genome RNA sequence
agcccuauguguucaucaaacg

SEQ ID NO: 9857 - RNA, 22 nt, Unknown
  Description of Unknown: Target viral genome RNA sequence
gcucucaugccgcuguugaugc

SEQ ID NO: 9858 - RNA, 22 nt, Unknown
  Description of Unknown: Target viral genome RNA sequence
ugcucucaugccgcuguugaug

SEQ ID NO: 9859 - RNA, 22 nt, Unknown
  Description of Unknown: Target viral genome RNA sequence
uguuuaucacccgcgaagaagc

SEQ ID NO: 9860 - RNA, 22 nt, Unknown
  Description of Unknown: Target viral genome RNA sequence
guuuaucacccgcgaagaagcu

SEQ ID NO: 9861 - RNA, 22 nt, Unknown
  Description of Unknown: Target viral genome RNA sequence
cccuaacauguuuaucacccgc

SEQ ID NO: 9862 - RNA, 22 nt, Unknown
  Description of Unknown: Target viral genome RNA sequence
ccuaacauguuuaucacccgcg

SEQ ID NO: 9863 - RNA, 22 nt, Unknown
  Description of Unknown: Target viral genome RNA sequence
cuaacauguuuaucacccgcga

SEQ ID NO: 9864 - RNA, 22 nt, Unknown
  Description of Unknown: Target viral genome RNA sequence
uaacauguuuaucacccgcgaa

SEQ ID NO: 9865 - RNA, 22 nt, Unknown
  Description of Unknown: Target viral genome RNA sequence
aacauguuuaucacccgcgaag

SEQ ID NO: 9866 - RNA, 22 nt, Unknown
  Description of Unknown: Target viral genome RNA sequence
acauguuuaucacccgcgaaga

SEQ ID NO: 9867 - RNA, 22 nt, Unknown
  Description of Unknown: Target viral genome RNA sequence
cauguuuaucacccgcgaagaa

SEQ ID NO: 9868 - RNA, 22 nt, Unknown
  Description of Unknown: Target viral genome RNA sequence
auguuuaucacccgcgaagaag

SEQ ID NO: 9869 - RNA, 22 nt, Unknown
  Description of Unknown: Target viral genome RNA sequence
aagcguggcaaccggguguugc

SEQ ID NO: 9870 - RNA, 22 nt, Unknown
  Description of Unknown: Target viral genome RNA sequence
caagcguggcaaccggguguug

SEQ ID NO: 9871 - RNA, 22 nt, Unknown
  Description of Unknown: Target viral genome RNA sequence
uguuuuuguuaccuucucuugc

SEQ ID NO: 9872 - RNA, 22 nt, Unknown
  Description of Unknown: Target viral genome RNA sequence
uuguuuuuguuaccuucucuug

SEQ ID NO: 9873 - RNA, 22 nt, Unknown
  Description of Unknown: Target viral genome RNA sequence
ucaccuuauaauucacagaaug

SEQ ID NO: 9874 - RNA, 22 nt, Unknown
  Description of Unknown: Target viral genome RNA sequence
gugaacaugagcaugaaauugc

SEQ ID NO: 9875 - RNA, 22 nt, Unknown
  Description of Unknown: Target viral genome RNA sequence
cgugaacaugagcaugaaauug

SEQ ID NO: 9876 - RNA, 22 nt, Unknown
  Description of Unknown: Target viral genome RNA sequence
ccgugaacaugagcaugaaauu

SEQ ID NO: 9877 - RNA, 22 nt, Unknown
  Description of Unknown: Target viral genome RNA sequence
gccgugaacaugagcaugaaau

SEQ ID NO: 9878 - RNA, 22 nt, Unknown
  Description of Unknown: Target viral genome RNA sequence
caugagcaugaaauugcuuggu

SEQ ID NO: 9879 - RNA, 22 nt, Unknown
  Description of Unknown: Target viral genome RNA sequence
gauugugugcguacugcugcaa

SEQ ID NO: 9880 - RNA, 22 nt, Unknown
  Description of Unknown: Target viral genome RNA sequence
gugcguacugcugcaauauugu

SEQ ID NO: 9881 - RNA, 22 nt, Unknown
  Description of Unknown: Target viral genome RNA sequence
guugcacuucuugcuguuuuuc

SEQ ID NO: 9882 - RNA, 22 nt, Unknown
  Description of Unknown: Target viral genome RNA sequence
auacucaauaauuugggugugg

SEQ ID NO: 9883 - RNA, 22 nt, Unknown
  Description of Unknown: Target viral genome RNA sequence
aaauacucaauaauuugggugu

SEQ ID NO: 9884 - RNA, 22 nt, Unknown
  Description of Unknown: Target viral genome RNA sequence
uacucaauaauuugggugugga

SEQ ID NO: 9885 - RNA, 22 nt, Unknown
  Description of Unknown: Target viral genome RNA sequence
agccgccacuagaggagcuacu

SEQ ID NO: 9886 - RNA, 22 nt, Unknown
  Description of Unknown: Target viral genome RNA sequence
uagccgccacuagaggagcuac

SEQ ID NO: 9887 - RNA, 22 nt, Unknown
  Description of Unknown: Target viral genome RNA sequence
auagccgccacuagaggagcua

SEQ ID NO: 9888 - RNA, 22 nt, Unknown
  Description of Unknown: Target viral genome RNA sequence
aauagccgccacuagaggagcu

SEQ ID NO: 9889 - RNA, 22 nt, Unknown
  Description of Unknown: Target viral genome RNA sequence
caauagccgccacuagaggagc

SEQ ID NO: 9890 - RNA, 22 nt, Unknown
  Description of Unknown: Target viral genome RNA sequence
ucaauagccgccacuagaggag

SEQ ID NO: 9891 - RNA, 22 nt, Unknown
  Description of Unknown: Target viral genome RNA sequence
aucaauagccgccacuagagga

SEQ ID NO: 9892 - RNA, 22 nt, Unknown
  Description of Unknown: Target viral genome RNA sequence
aaucaauagccgccacuagagg

SEQ ID NO: 9893 - RNA, 22 nt, Unknown
  Description of Unknown: Target viral genome RNA sequence
ccgccacuagaggagcuacugu

SEQ ID NO: 9894 - RNA, 22 nt, Unknown
  Description of Unknown: Target viral genome RNA sequence
gccgccacuagaggagcuacug

SEQ ID NO: 9895 - RNA, 22 nt, Unknown
  Description of Unknown: Target viral genome RNA sequence
ccuacaacuugugcuaaugacc

SEQ ID NO: 9896 - RNA, 22 nt, Unknown
  Description of Unknown: Target viral genome RNA sequence
accuacaacuugugcuaaugac

SEQ ID NO: 9897 - RNA, 22 nt, Unknown
  Description of Unknown: Target viral genome RNA sequence
cuacaacuugugcuaaugaccc

SEQ ID NO: 9898 - RNA, 22 nt, Unknown
  Description of Unknown: Target viral genome RNA sequence
aauaccuacaacuugugcuaau

SEQ ID NO: 9899 - RNA, 22 nt, Unknown
  Description of Unknown: Target viral genome RNA sequence
aaauaccuacaacuugugcuaa

SEQ ID NO: 9900 - RNA, 22 nt, Unknown
  Description of Unknown: Target viral genome RNA sequence
uaccuacaacuugugcuaauga

SEQ ID NO: 9901 - RNA, 22 nt, Unknown
  Description of Unknown: Target viral genome RNA sequence
auaccuacaacuugugcuaaug

SEQ ID NO: 9902 - RNA, 22 nt, Unknown
  Description of Unknown: Target viral genome RNA sequence
gaccaccugguacugguaagag

SEQ ID NO: 9903 - RNA, 22 nt, Unknown
  Description of Unknown: Target viral genome RNA sequence
accaccugguacugguaagagu

SEQ ID NO: 9904 - RNA, 22 nt, Unknown
  Description of Unknown: Target viral genome RNA sequence
cugguacugguaagagucauuu

SEQ ID NO: 9905 - RNA, 22 nt, Unknown
  Description of Unknown: Target viral genome RNA sequence
ugguacugguaagagucauuuu

SEQ ID NO: 9906 - RNA, 22 nt, Unknown
  Description of Unknown: Target viral genome RNA sequence
accugguacugguaagagucau

SEQ ID NO: 9907 - RNA, 22 nt, Unknown
  Description of Unknown: Target viral genome RNA sequence
ccugguacugguaagagucauu

SEQ ID NO: 9908 - RNA, 22 nt, Unknown
  Description of Unknown: Target viral genome RNA sequence
gguacacuuaugauugaacggu

SEQ ID NO: 9909 - RNA, 22 nt, Unknown
  Description of Unknown: Target viral genome RNA sequence
aaacagaugguacacuuaugau

SEQ ID NO: 9910 - RNA, 22 nt, Unknown
  Description of Unknown: Target viral genome RNA sequence
aacagaugguacacuuaugauu

SEQ ID NO: 9911 - RNA, 22 nt, Unknown
  Description of Unknown: Target viral genome RNA sequence
acagaugguacacuuaugauug

SEQ ID NO: 9912 - RNA, 22 nt, Unknown
  Description of Unknown: Target viral genome RNA sequence
cagaugguacacuuaugauuga

SEQ ID NO: 9913 - RNA, 22 nt, Unknown
  Description of Unknown: Target viral genome RNA sequence
agaugguacacuuaugauugaa

SEQ ID NO: 9914 - RNA, 22 nt, Unknown
  Description of Unknown: Target viral genome RNA sequence
gaugguacacuuaugauugaac

SEQ ID NO: 9915 - RNA, 22 nt, Unknown
  Description of Unknown: Target viral genome RNA sequence
augguacacuuaugauugaacg

SEQ ID NO: 9916 - RNA, 22 nt, Unknown
  Description of Unknown: Target viral genome RNA sequence
uagcuuguuuugugcuugcugc

SEQ ID NO: 9917 - RNA, 22 nt, Unknown
  Description of Unknown: Target viral genome RNA sequence
augaguacgaacuuauguacuc

SEQ ID NO: 9918 - RNA, 22 nt, Unknown
  Description of Unknown: Target viral genome RNA sequence
ugaguacgaacuuauguacuca

SEQ ID NO: 9919 - RNA, 22 nt, Unknown
  Description of Unknown: Target viral genome RNA sequence
aaacuguucaucagacaagagg

SEQ ID NO: 9920 - RNA, 22 nt, Unknown
  Description of Unknown: Target viral genome RNA sequence
aacuguucaucagacaagagga

SEQ ID NO: 9921 - RNA, 22 nt, Unknown
  Description of Unknown: Target viral genome RNA sequence
acuguuuauagugauguagaaa

SEQ ID NO: 9922 - RNA, 22 nt, Unknown
  Description of Unknown: Target viral genome RNA sequence
ccucaccuuauggguugggauu

SEQ ID NO: 9923 - RNA, 22 nt, Unknown
  Description of Unknown: Target viral genome RNA sequence
cucaccuuauggguugggauua

SEQ ID NO: 9924 - RNA, 22 nt, Unknown
  Description of Unknown: Target viral genome RNA sequence
ucaccuuauggguugggauuau

SEQ ID NO: 9925 - RNA, 22 nt, Unknown
  Description of Unknown: Target viral genome RNA sequence
caccuuauggguugggauuauc

SEQ ID NO: 9926 - RNA, 22 nt, Unknown
  Description of Unknown: Target viral genome RNA sequence
accuuauggguugggauuaucc

SEQ ID NO: 9927 - RNA, 22 nt, Unknown
  Description of Unknown: Target viral genome RNA sequence
ugguuuaacuucuauuaaaugg

SEQ ID NO: 9928 - RNA, 22 nt, Unknown
  Description of Unknown: Target viral genome RNA sequence
gguuuaacuucuauuaaauggg

SEQ ID NO: 9929 - RNA, 22 nt, Unknown
  Description of Unknown: Target viral genome RNA sequence
guuuaacuucuauuaaaugggc

SEQ ID NO: 9930 - RNA, 22 nt, Unknown
  Description of Unknown: Target viral genome RNA sequence
gaauguggcuaaaucugaauuu

SEQ ID NO: 9931 - RNA, 22 nt, Unknown
  Description of Unknown: Target viral genome RNA sequence
ugaauguggcuaaaucugaauu

SEQ ID NO: 9932 - RNA, 22 nt, Unknown
  Description of Unknown: Target viral genome RNA sequence
aagucuuugaauguggcuaaau

SEQ ID NO: 9933 - RNA, 22 nt, Unknown
  Description of Unknown: Target viral genome RNA sequence
gucuuugaauguggcuaaaucu

SEQ ID NO: 9934 - RNA, 22 nt, Unknown
  Description of Unknown: Target viral genome RNA sequence
agucuuugaauguggcuaaauc

SEQ ID NO: 9935 - RNA, 22 nt, Unknown
  Description of Unknown: Target viral genome RNA sequence
cuuugaauguggcuaaaucuga

SEQ ID NO: 9936 - RNA, 22 nt, Unknown
  Description of Unknown: Target viral genome RNA sequence
ucuuugaauguggcuaaaucug

SEQ ID NO: 9937 - RNA, 22 nt, Unknown
  Description of Unknown: Target viral genome RNA sequence
uugaauguggcuaaaucugaau

SEQ ID NO: 9938 - RNA, 22 nt, Unknown
  Description of Unknown: Target viral genome RNA sequence
aacuuaggugaacguguacgcc

SEQ ID NO: 9939 - RNA, 22 nt, Unknown
  Description of Unknown: Target viral genome RNA sequence
acuuaggugaacguguacgcca

SEQ ID NO: 9940 - RNA, 22 nt, Unknown
  Description of Unknown: Target viral genome RNA sequence
cuuaggugaacguguacgccaa

SEQ ID NO: 9941 - RNA, 22 nt, Unknown
  Description of Unknown: Target viral genome RNA sequence
ccagaaacuaacauucuucuca

SEQ ID NO: 9942 - RNA, 22 nt, Unknown
  Description of Unknown: Target viral genome RNA sequence
cagaaacuaacauucuucucaa

SEQ ID NO: 9943 - RNA, 22 nt, Unknown
  Description of Unknown: Target viral genome RNA sequence
gcguuguccugcugaaauuguu

SEQ ID NO: 9944 - RNA, 22 nt, Unknown
  Description of Unknown: Target viral genome RNA sequence
ggcguuguccugcugaaauugu

SEQ ID NO: 9945 - RNA, 22 nt, Unknown
  Description of Unknown: Target viral genome RNA sequence
cggcguuguccugcugaaauug

SEQ ID NO: 9946 - RNA, 22 nt, Unknown
  Description of Unknown: Target viral genome RNA sequence
ucggcguuguccugcugaaauu

SEQ ID NO: 9947 - RNA, 22 nt, Unknown
  Description of Unknown: Target viral genome RNA sequence
gucggcguuguccugcugaaau

SEQ ID NO: 9948 - RNA, 22 nt, Unknown
  Description of Unknown: Target viral genome RNA sequence
ugucggcguuguccugcugaaa

SEQ ID NO: 9949 - RNA, 22 nt, Unknown
  Description of Unknown: Target viral genome RNA sequence
uugucggcguuguccugcugaa

SEQ ID NO: 9950 - RNA, 22 nt, Unknown
  Description of Unknown: Target viral genome RNA sequence
uuguccugcugaaauuguugac

SEQ ID NO: 9951 - RNA, 22 nt, Unknown
  Description of Unknown: Target viral genome RNA sequence
guuguccugcugaaauuguuga

SEQ ID NO: 9952 - RNA, 22 nt, Unknown
  Description of Unknown: Target viral genome RNA sequence
gaaccagaauauuucaauucag

SEQ ID NO: 9953 - RNA, 22 nt, Unknown
  Description of Unknown: Target viral genome RNA sequence
gcaagguucuucuucguaagaa

SEQ ID NO: 9954 - RNA, 22 nt, Unknown
  Description of Unknown: Target viral genome RNA sequence
cgcaagguucuucuucguaaga

SEQ ID NO: 9955 - RNA, 22 nt, Unknown
  Description of Unknown: Target viral genome RNA sequence
ccgcaagguucuucuucguaag

SEQ ID NO: 9956 - RNA, 22 nt, Unknown
  Description of Unknown: Target viral genome RNA sequence
accgcaagguucuucuucguaa

SEQ ID NO: 9957 - RNA, 22 nt, Unknown
  Description of Unknown: Target viral genome RNA sequence
gguucuucuucguaagaacggu

SEQ ID NO: 9958 - RNA, 22 nt, Unknown
  Description of Unknown: Target viral genome RNA sequence
agguucuucuucguaagaacgg

SEQ ID NO: 9959 - RNA, 22 nt, Unknown
  Description of Unknown: Target viral genome RNA sequence
aagguucuucuucguaagaacg

SEQ ID NO: 9960 - RNA, 22 nt, Unknown
  Description of Unknown: Target viral genome RNA sequence
caagguucuucuucguaagaac

SEQ ID NO: 9961 - RNA, 22 nt, Unknown
  Description of Unknown: Target viral genome RNA sequence
uucuucuucguaagaacgguaa

SEQ ID NO: 9962 - RNA, 22 nt, Unknown
  Description of Unknown: Target viral genome RNA sequence
guucuucuucguaagaacggua

SEQ ID NO: 9963 - RNA, 22 nt, Unknown
  Description of Unknown: Target viral genome RNA sequence
aaugcuagggagagcugccuau

SEQ ID NO: 9964 - RNA, 22 nt, Unknown
  Description of Unknown: Target viral genome RNA sequence
augcuagggagagcugccuaua

SEQ ID NO: 9965 - RNA, 22 nt, Unknown
  Description of Unknown: Target viral genome RNA sequence
ugcuagggagagcugccuauau

SEQ ID NO: 9966 - RNA, 22 nt, Unknown
  Description of Unknown: Target viral genome RNA sequence
caaacuguugauucaucacagg

SEQ ID NO: 9967 - RNA, 22 nt, Unknown
  Description of Unknown: Target viral genome RNA sequence
cuguugauucaucacagggcuc

SEQ ID NO: 9968 - RNA, 22 nt, Unknown
  Description of Unknown: Target viral genome RNA sequence
gcacuacgacagaugucuugug

SEQ ID NO: 9969 - RNA, 22 nt, Unknown
  Description of Unknown: Target viral genome RNA sequence
aaacuguugauucaucacaggg

SEQ ID NO: 9970 - RNA, 22 nt, Unknown
  Description of Unknown: Target viral genome RNA sequence
aaagacuucuaugacuuugcug

SEQ ID NO: 9971 - RNA, 22 nt, Unknown
  Description of Unknown: Target viral genome RNA sequence
aaauuucauuuaugcuuuggug

SEQ ID NO: 9972 - RNA, 22 nt, Unknown
  Description of Unknown: Target viral genome RNA sequence
gaaauuucauuuaugcuuuggu

SEQ ID NO: 9973 - RNA, 22 nt, Unknown
  Description of Unknown: Target viral genome RNA sequence
auuucauuuaugcuuuggugua

SEQ ID NO: 9974 - RNA, 22 nt, Unknown
  Description of Unknown: Target viral genome RNA sequence
aauuucauuuaugcuuuggugu

SEQ ID NO: 9975 - RNA, 22 nt, Unknown
  Description of Unknown: Target viral genome RNA sequence
uuucauuuaugcuuugguguaa

SEQ ID NO: 9976 - RNA, 22 nt, Unknown
  Description of Unknown: Target viral genome RNA sequence
cagauguuucaucucguugacu

SEQ ID NO: 9977 - RNA, 22 nt, Unknown
  Description of Unknown: Target viral genome RNA sequence
acagauguuucaucucguugac

SEQ ID NO: 9978 - RNA, 22 nt, Unknown
  Description of Unknown: Target viral genome RNA sequence
aacagauguuucaucucguuga

SEQ ID NO: 9979 - RNA, 22 nt, Unknown
  Description of Unknown: Target viral genome RNA sequence
caacagauguuucaucucguug

SEQ ID NO: 9980 - RNA, 22 nt, Unknown
  Description of Unknown: Target viral genome RNA sequence
agauguuucaucucguugacuu

SEQ ID NO: 9981 - RNA, 22 nt, Unknown
  Description of Unknown: Target viral genome RNA sequence
aagccucacucccuuucggaug

SEQ ID NO: 9982 - RNA, 22 nt, Unknown
  Description of Unknown: Target viral genome RNA sequence
agccucacucccuuucggaugg

SEQ ID NO: 9983 - RNA, 22 nt, Unknown
  Description of Unknown: Target viral genome RNA sequence
gccucacucccuuucggauggc

SEQ ID NO: 9984 - RNA, 22 nt, Unknown
  Description of Unknown: Target viral genome RNA sequence
ccucacucccuuucggauggcu

SEQ ID NO: 9985 - RNA, 22 nt, Unknown
  Description of Unknown: Target viral genome RNA sequence
auacaagccucacucccuuucg

SEQ ID NO: 9986 - RNA, 22 nt, Unknown
  Description of Unknown: Target viral genome RNA sequence
uacaagccucacucccuuucgg

SEQ ID NO: 9987 - RNA, 22 nt, Unknown
  Description of Unknown: Target viral genome RNA sequence
acaagccucacucccuuucgga

SEQ ID NO: 9988 - RNA, 22 nt, Unknown
  Description of Unknown: Target viral genome RNA sequence
caagccucacucccuuucggau

SEQ ID NO: 9989 - RNA, 22 nt, Unknown
  Description of Unknown: Target viral genome RNA sequence
cucacucccuuucggauggcuu

SEQ ID NO: 9990 - RNA, 22 nt, Unknown
  Description of Unknown: Target viral genome RNA sequence
ucacucccuuucggauggcuua

SEQ ID NO: 9991 - RNA, 22 nt, Unknown
  Description of Unknown: Target viral genome RNA sequence
auucuuggaaugcugaucuuua

SEQ ID NO: 9992 - RNA, 22 nt, Unknown
  Description of Unknown: Target viral genome RNA sequence
uugaccgccucaaugagguugc

SEQ ID NO: 9993 - RNA, 22 nt, Unknown
  Description of Unknown: Target viral genome RNA sequence
agaaauugaccgccucaaugag

SEQ ID NO: 9994 - RNA, 22 nt, Unknown
  Description of Unknown: Target viral genome RNA sequence
aagaaauugaccgccucaauga

SEQ ID NO: 9995 - RNA, 22 nt, Unknown
  Description of Unknown: Target viral genome RNA sequence
aaagaaauugaccgccucaaug

SEQ ID NO: 9996 - RNA, 22 nt, Unknown
  Description of Unknown: Target viral genome RNA sequence
auugaccgccucaaugagguug

SEQ ID NO: 9997 - RNA, 22 nt, Unknown
  Description of Unknown: Target viral genome RNA sequence
aauugaccgccucaaugagguu

SEQ ID NO: 9998 - RNA, 22 nt, Unknown
  Description of Unknown: Target viral genome RNA sequence
aaauugaccgccucaaugaggu

SEQ ID NO: 9999 - RNA, 22 nt, Unknown
  Description of Unknown: Target viral genome RNA sequence
gaaauugaccgccucaaugagg

SEQ ID NO: 10000 - RNA, 22 nt, Unknown
  Description of Unknown: Target viral genome RNA sequence
ucgauugugugcguacugcugc

SEQ ID NO: 10001 - RNA, 22 nt, Unknown
  Description of Unknown: Target viral genome RNA sequence
cgauugugugcguacugcugca

SEQ ID NO: 10002 - RNA, 22 nt, Unknown
  Description of Unknown: Target viral genome RNA sequence
uugugugcguacugcugcaaua

SEQ ID NO: 10003 - RNA, 22 nt, Unknown
  Description of Unknown: Target viral genome RNA sequence
ugugugcguacugcugcaauau

SEQ ID NO: 10004 - RNA, 22 nt, Unknown
  Description of Unknown: Target viral genome RNA sequence
gugugcguacugcugcaauauu

SEQ ID NO: 10005 - RNA, 22 nt, Unknown
  Description of Unknown: Target viral genome RNA sequence
ugugcguacugcugcaauauug

SEQ ID NO: 10006 - RNA, 22 nt, Unknown
  Description of Unknown: Target viral genome RNA sequence
ugcguacugcugcaauauuguu

SEQ ID NO: 10007 - RNA, 22 nt, Unknown
  Description of Unknown: Target viral genome RNA sequence
gacuauggugaugcuguuguuu

SEQ ID NO: 10008 - RNA, 22 nt, Unknown
  Description of Unknown: Target viral genome RNA sequence
uugugcuuuuuagccuuucugc

SEQ ID NO: 10009 - RNA, 22 nt, Unknown
  Description of Unknown: Target viral genome RNA sequence
ugugcuuuuuagccuuucugcu

SEQ ID NO: 10010 - RNA, 22 nt, Unknown
  Description of Unknown: Target viral genome RNA sequence
gugcuuuuuagccuuucugcua

SEQ ID NO: 10011 - RNA, 22 nt, Unknown
  Description of Unknown: Target viral genome RNA sequence
ugcuuuuuagccuuucugcuau

SEQ ID NO: 10012 - RNA, 22 nt, Unknown
  Description of Unknown: Target viral genome RNA sequence
cuauuugugcuuuuuagccuuu

SEQ ID NO: 10013 - RNA, 22 nt, Unknown
  Description of Unknown: Target viral genome RNA sequence
uuugugcuuuuuagccuuucug

SEQ ID NO: 10014 - RNA, 22 nt, Unknown
  Description of Unknown: Target viral genome RNA sequence
gcuuuuuagccuuucugcuauu

SEQ ID NO: 10015 - RNA, 22 nt, Unknown
  Description of Unknown: Target viral genome RNA sequence
cuuuuuagccuuucugcuauuc

SEQ ID NO: 10016 - RNA, 22 nt, Unknown
  Description of Unknown: Target viral genome RNA sequence
gagggagccuugaauacaccaa

SEQ ID NO: 10017 - RNA, 22 nt, Unknown
  Description of Unknown: Target viral genome RNA sequence
agggagccuugaauacaccaaa

SEQ ID NO: 10018 - RNA, 22 nt, Unknown
  Description of Unknown: Target viral genome RNA sequence
gcaacugagggagccuugaaua

SEQ ID NO: 10019 - RNA, 22 nt, Unknown
  Description of Unknown: Target viral genome RNA sequence
caacugagggagccuugaauac

SEQ ID NO: 10020 - RNA, 22 nt, Unknown
  Description of Unknown: Target viral genome RNA sequence
uugcaacugagggagccuugaa

SEQ ID NO: 10021 - RNA, 22 nt, Unknown
  Description of Unknown: Target viral genome RNA sequence
ugcaacugagggagccuugaau

SEQ ID NO: 10022 - RNA, 22 nt, Unknown
  Description of Unknown: Target viral genome RNA sequence
cugagggagccuugaauacacc

SEQ ID NO: 10023 - RNA, 22 nt, Unknown
  Description of Unknown: Target viral genome RNA sequence
ugagggagccuugaauacacca

SEQ ID NO: 10024 - RNA, 22 nt, Unknown
  Description of Unknown: Target viral genome RNA sequence
aacugagggagccuugaauaca

SEQ ID NO: 10025 - RNA, 22 nt, Unknown
  Description of Unknown: Target viral genome RNA sequence
acugagggagccuugaauacac

SEQ ID NO: 10026 - RNA, 22 nt, Unknown
  Description of Unknown: Target viral genome RNA sequence
cuggaacauacgagggcaauuc

SEQ ID NO: 10027 - RNA, 22 nt, Unknown
  Description of Unknown: Target viral genome RNA sequence
ucuggaacauacgagggcaauu

SEQ ID NO: 10028 - RNA, 22 nt, Unknown
  Description of Unknown: Target viral genome RNA sequence
acuagugccacaagagcacuau

SEQ ID NO: 10029 - RNA, 22 nt, Unknown
  Description of Unknown: Target viral genome RNA sequence
cuagugccacaagagcacuaug

SEQ ID NO: 10030 - RNA, 22 nt, Unknown
  Description of Unknown: Target viral genome RNA sequence
accuacacuagugccacaagag

SEQ ID NO: 10031 - RNA, 22 nt, Unknown
  Description of Unknown: Target viral genome RNA sequence
ccuacacuagugccacaagagc

SEQ ID NO: 10032 - RNA, 22 nt, Unknown
  Description of Unknown: Target viral genome RNA sequence
gcaccuacacuagugccacaag

SEQ ID NO: 10033 - RNA, 22 nt, Unknown
  Description of Unknown: Target viral genome RNA sequence
caccuacacuagugccacaaga

SEQ ID NO: 10034 - RNA, 22 nt, Unknown
  Description of Unknown: Target viral genome RNA sequence
acacuagugccacaagagcacu

SEQ ID NO: 10035 - RNA, 22 nt, Unknown
  Description of Unknown: Target viral genome RNA sequence
cacuagugccacaagagcacua

SEQ ID NO: 10036 - RNA, 22 nt, Unknown
  Description of Unknown: Target viral genome RNA sequence
cuacacuagugccacaagagca

SEQ ID NO: 10037 - RNA, 22 nt, Unknown
  Description of Unknown: Target viral genome RNA sequence
uacacuagugccacaagagcac

SEQ ID NO: 10038 - RNA, 22 nt, Unknown
  Description of Unknown: Target viral genome RNA sequence
uuugcagcagaaacgcucaaag

SEQ ID NO: 10039 - RNA, 22 nt, Unknown
  Description of Unknown: Target viral genome RNA sequence
uugcagcagaaacgcucaaagc

SEQ ID NO: 10040 - RNA, 22 nt, Unknown
  Description of Unknown: Target viral genome RNA sequence
gcuuuuugcagcagaaacgcuc

SEQ ID NO: 10041 - RNA, 22 nt, Unknown
  Description of Unknown: Target viral genome RNA sequence
cuuuuugcagcagaaacgcuca

SEQ ID NO: 10042 - RNA, 22 nt, Unknown
  Description of Unknown: Target viral genome RNA sequence
uuuuugcagcagaaacgcucaa

SEQ ID NO: 10043 - RNA, 22 nt, Unknown
  Description of Unknown: Target viral genome RNA sequence
uuuugcagcagaaacgcucaaa

SEQ ID NO: 10044 - RNA, 22 nt, Unknown
  Description of Unknown: Target viral genome RNA sequence
ucaagcuuuuugcagcagaaac

SEQ ID NO: 10045 - RNA, 22 nt, Unknown
  Description of Unknown: Target viral genome RNA sequence
caagcuuuuugcagcagaaacg

SEQ ID NO: 10046 - RNA, 22 nt, Unknown
  Description of Unknown: Target viral genome RNA sequence
aagcuuuuugcagcagaaacgc

SEQ ID NO: 10047 - RNA, 22 nt, Unknown
  Description of Unknown: Target viral genome RNA sequence
agcuuuuugcagcagaaacgcu

SEQ ID NO: 10048 - RNA, 22 nt, Unknown
  Description of Unknown: Target viral genome RNA sequence
cauacaaugcuaguuaaacagg

SEQ ID NO: 10049 - RNA, 22 nt, Unknown
  Description of Unknown: Target viral genome RNA sequence
auacaaugcuaguuaaacaggg

SEQ ID NO: 10050 - RNA, 22 nt, Unknown
  Description of Unknown: Target viral genome RNA sequence
acacguugcaauuuagguggug

SEQ ID NO: 10051 - RNA, 22 nt, Unknown
  Description of Unknown: Target viral genome RNA sequence
uaugaugucagcaccaccugcu

SEQ ID NO: 10052 - RNA, 22 nt, Unknown
  Description of Unknown: Target viral genome RNA sequence
uguuaugaugucagcaccaccu

SEQ ID NO: 10053 - RNA, 22 nt, Unknown
  Description of Unknown: Target viral genome RNA sequence
acucaaaugaaucuuaaguaug

SEQ ID NO: 10054 - RNA, 22 nt, Unknown
  Description of Unknown: Target viral genome RNA sequence
cucaaaugaaucuuaaguaugc

SEQ ID NO: 10055 - RNA, 22 nt, Unknown
  Description of Unknown: Target viral genome RNA sequence
acuauaacucaaaugaaucuua

SEQ ID NO: 10056 - RNA, 22 nt, Unknown
  Description of Unknown: Target viral genome RNA sequence
cuauaacucaaaugaaucuuaa

SEQ ID NO: 10057 - RNA, 22 nt, Unknown
  Description of Unknown: Target viral genome RNA sequence
cuacuauaacucaaaugaaucu

SEQ ID NO: 10058 - RNA, 22 nt, Unknown
  Description of Unknown: Target viral genome RNA sequence
uacuauaacucaaaugaaucuu

SEQ ID NO: 10059 - RNA, 22 nt, Unknown
  Description of Unknown: Target viral genome RNA sequence
uaacucaaaugaaucuuaagua

SEQ ID NO: 10060 - RNA, 22 nt, Unknown
  Description of Unknown: Target viral genome RNA sequence
aacucaaaugaaucuuaaguau

SEQ ID NO: 10061 - RNA, 22 nt, Unknown
  Description of Unknown: Target viral genome RNA sequence
uauaacucaaaugaaucuuaag

SEQ ID NO: 10062 - RNA, 22 nt, Unknown
  Description of Unknown: Target viral genome RNA sequence
auaacucaaaugaaucuuaagu

SEQ ID NO: 10063 - RNA, 22 nt, Unknown
  Description of Unknown: Target viral genome RNA sequence
uuguaguuucaacuggauacca

SEQ ID NO: 10064 - RNA, 22 nt, Unknown
  Description of Unknown: Target viral genome RNA sequence
uuuguaguuucaacuggauacc

SEQ ID NO: 10065 - RNA, 22 nt, Unknown
  Description of Unknown: Target viral genome RNA sequence
aguuuaugauccuuugcaaccu

SEQ ID NO: 10066 - RNA, 22 nt, Unknown
  Description of Unknown: Target viral genome RNA sequence
guuuaugauccuuugcaaccug

SEQ ID NO: 10067 - RNA, 22 nt, Unknown
  Description of Unknown: Target viral genome RNA sequence
aacaacacaguuuaugauccuu

SEQ ID NO: 10068 - RNA, 22 nt, Unknown
  Description of Unknown: Target viral genome RNA sequence
acaacacaguuuaugauccuuu

SEQ ID NO: 10069 - RNA, 22 nt, Unknown
  Description of Unknown: Target viral genome RNA sequence
caacacaguuuaugauccuuug

SEQ ID NO: 10070 - RNA, 22 nt, Unknown
  Description of Unknown: Target viral genome RNA sequence
aacacaguuuaugauccuuugc

SEQ ID NO: 10071 - RNA, 22 nt, Unknown
  Description of Unknown: Target viral genome RNA sequence
acacaguuuaugauccuuugca

SEQ ID NO: 10072 - RNA, 22 nt, Unknown
  Description of Unknown: Target viral genome RNA sequence
cacaguuuaugauccuuugcaa

SEQ ID NO: 10073 - RNA, 22 nt, Unknown
  Description of Unknown: Target viral genome RNA sequence
acaguuuaugauccuuugcaac

SEQ ID NO: 10074 - RNA, 22 nt, Unknown
  Description of Unknown: Target viral genome RNA sequence
caguuuaugauccuuugcaacc

SEQ ID NO: 10075 - RNA, 22 nt, Unknown
  Description of Unknown: Target viral genome RNA sequence
caaucuuuaaucaguguguaac

SEQ ID NO: 10076 - RNA, 22 nt, Unknown
  Description of Unknown: Target viral genome RNA sequence
aaucuuuaaucaguguguaaca

SEQ ID NO: 10077 - RNA, 22 nt, Unknown
  Description of Unknown: Target viral genome RNA sequence
ucacauagcaaucuuuaaucag

SEQ ID NO: 10078 - RNA, 22 nt, Unknown
  Description of Unknown: Target viral genome RNA sequence
cacauagcaaucuuuaaucagu

SEQ ID NO: 10079 - RNA, 22 nt, Unknown
  Description of Unknown: Target viral genome RNA sequence
acauagcaaucuuuaaucagug

SEQ ID NO: 10080 - RNA, 22 nt, Unknown
  Description of Unknown: Target viral genome RNA sequence
cauagcaaucuuuaaucagugu

SEQ ID NO: 10081 - RNA, 22 nt, Unknown
  Description of Unknown: Target viral genome RNA sequence
auagcaaucuuuaaucagugug

SEQ ID NO: 10082 - RNA, 22 nt, Unknown
  Description of Unknown: Target viral genome RNA sequence
uagcaaucuuuaaucagugugu

SEQ ID NO: 10083 - RNA, 22 nt, Unknown
  Description of Unknown: Target viral genome RNA sequence
agcaaucuuuaaucagugugua

SEQ ID NO: 10084 - RNA, 22 nt, Unknown
  Description of Unknown: Target viral genome RNA sequence
gcaaucuuuaaucaguguguaa

SEQ ID NO: 10085 - RNA, 22 nt, Unknown
  Description of Unknown: Target viral genome RNA sequence
uaaggguuucuuuaaggaagga

SEQ ID NO: 10086 - RNA, 22 nt, Unknown
  Description of Unknown: Target viral genome RNA sequence
cuaaggguuucuuuaaggaagg

SEQ ID NO: 10087 - RNA, 22 nt, Unknown
  Description of Unknown: Target viral genome RNA sequence
ucuaaggguuucuuuaaggaag

SEQ ID NO: 10088 - RNA, 22 nt, Unknown
  Description of Unknown: Target viral genome RNA sequence
gucuaaggguuucuuuaaggaa

SEQ ID NO: 10089 - RNA, 22 nt, Unknown
  Description of Unknown: Target viral genome RNA sequence
gguuucuuuaaggaaggaaguu

SEQ ID NO: 10090 - RNA, 22 nt, Unknown
  Description of Unknown: Target viral genome RNA sequence
ggguuucuuuaaggaaggaagu

SEQ ID NO: 10091 - RNA, 22 nt, Unknown
  Description of Unknown: Target viral genome RNA sequence
aggguuucuuuaaggaaggaag

SEQ ID NO: 10092 - RNA, 22 nt, Unknown
  Description of Unknown: Target viral genome RNA sequence
aaggguuucuuuaaggaaggaa

SEQ ID NO: 10093 - RNA, 22 nt, Unknown
  Description of Unknown: Target viral genome RNA sequence
uuucuuuaaggaaggaaguucu

SEQ ID NO: 10094 - RNA, 22 nt, Unknown
  Description of Unknown: Target viral genome RNA sequence
guuucuuuaaggaaggaaguuc

SEQ ID NO: 10095 - RNA, 22 nt, Unknown
  Description of Unknown: Target viral genome RNA sequence
acauaaacgaacuuauggauuu

SEQ ID NO: 10096 - RNA, 22 nt, Unknown
  Description of Unknown: Target viral genome RNA sequence
cauaaacgaacuuauggauuug

SEQ ID NO: 10097 - RNA, 22 nt, Unknown
  Description of Unknown: Target viral genome RNA sequence
acacauaaacgaacuuauggau

SEQ ID NO: 10098 - RNA, 22 nt, Unknown
  Description of Unknown: Target viral genome RNA sequence
cacauaaacgaacuuauggauu

SEQ ID NO: 10099 - RNA, 22 nt, Unknown
  Description of Unknown: Target viral genome RNA sequence
auuaugauuugaguguugucaa

SEQ ID NO: 10100 - RNA, 22 nt, Unknown
  Description of Unknown: Target viral genome RNA sequence
augauuugaguguugucaaugc

SEQ ID NO: 10101 - RNA, 22 nt, Unknown
  Description of Unknown: Target viral genome RNA sequence
uuaugauuugaguguugucaau

SEQ ID NO: 10102 - RNA, 22 nt, Unknown
  Description of Unknown: Target viral genome RNA sequence
uaugauuugaguguugucaaug

SEQ ID NO: 10103 - RNA, 22 nt, Unknown
  Description of Unknown: Target viral genome RNA sequence
auagauaaauguaguagaauua

SEQ ID NO: 10104 - RNA, 22 nt, Unknown
  Description of Unknown: Target viral genome RNA sequence
ccuauagauaaauguaguagaa

SEQ ID NO: 10105 - RNA, 22 nt, Unknown
  Description of Unknown: Target viral genome RNA sequence
cuauagauaaauguaguagaau

SEQ ID NO: 10106 - RNA, 22 nt, Unknown
  Description of Unknown: Target viral genome RNA sequence
ugccuauagauaaauguaguag

SEQ ID NO: 10107 - RNA, 22 nt, Unknown
  Description of Unknown: Target viral genome RNA sequence
gccuauagauaaauguaguaga

SEQ ID NO: 10108 - RNA, 22 nt, Unknown
  Description of Unknown: Target viral genome RNA sequence
cggaagagacagguacguuaau

SEQ ID NO: 10109 - RNA, 22 nt, Unknown
  Description of Unknown: Target viral genome RNA sequence
auucguuucggaagagacaggu

SEQ ID NO: 10110 - RNA, 22 nt, Unknown
  Description of Unknown: Target viral genome RNA sequence
uucguuucggaagagacaggua

SEQ ID NO: 10111 - RNA, 22 nt, Unknown
  Description of Unknown: Target viral genome RNA sequence
ucguuucggaagagacagguac

SEQ ID NO: 10112 - RNA, 22 nt, Unknown
  Description of Unknown: Target viral genome RNA sequence
cguuucggaagagacagguacg

SEQ ID NO: 10113 - RNA, 22 nt, Unknown
  Description of Unknown: Target viral genome RNA sequence
guuucggaagagacagguacgu

SEQ ID NO: 10114 - RNA, 22 nt, Unknown
  Description of Unknown: Target viral genome RNA sequence
uuucggaagagacagguacguu

SEQ ID NO: 10115 - RNA, 22 nt, Unknown
  Description of Unknown: Target viral genome RNA sequence
uucggaagagacagguacguua

SEQ ID NO: 10116 - RNA, 22 nt, Unknown
  Description of Unknown: Target viral genome RNA sequence
ucggaagagacagguacguuaa

SEQ ID NO: 10117 - RNA, 22 nt, Unknown
  Description of Unknown: Target viral genome RNA sequence
acucauucguuucggaagagac

SEQ ID NO: 10118 - RNA, 22 nt, Unknown
  Description of Unknown: Target viral genome RNA sequence
cucauucguuucggaagagaca

SEQ ID NO: 10119 - RNA, 22 nt, Unknown
  Description of Unknown: Target viral genome RNA sequence
acaucacgaacgcuuucuuauu

SEQ ID NO: 10120 - RNA, 22 nt, Unknown
  Description of Unknown: Target viral genome RNA sequence
cacgaacgcuuucuuauuacaa

SEQ ID NO: 10121 - RNA, 22 nt, Unknown
  Description of Unknown: Target viral genome RNA sequence
gaugccacaacugcuuaugcua

SEQ ID NO: 10122 - RNA, 22 nt, Unknown
  Description of Unknown: Target viral genome RNA sequence
aaugggcuagauucccuaagag

SEQ ID NO: 10123 - RNA, 22 nt, Unknown
  Description of Unknown: Target viral genome RNA sequence
aaaugggcuagauucccuaaga

SEQ ID NO: 10124 - RNA, 22 nt, Unknown
  Description of Unknown: Target viral genome RNA sequence
ugggcuagauucccuaagagug

SEQ ID NO: 10125 - RNA, 22 nt, Unknown
  Description of Unknown: Target viral genome RNA sequence
augggcuagauucccuaagagu

SEQ ID NO: 10126 - RNA, 22 nt, Unknown
  Description of Unknown: Target viral genome RNA sequence
gaaaugggcuagauucccuaag

SEQ ID NO: 10127 - RNA, 22 nt, Unknown
  Description of Unknown: Target viral genome RNA sequence
ugaaaugggcuagauucccuaa

SEQ ID NO: 10128 - RNA, 22 nt, Unknown
  Description of Unknown: Target viral genome RNA sequence
ggcuagauucccuaagagugau

SEQ ID NO: 10129 - RNA, 22 nt, Unknown
  Description of Unknown: Target viral genome RNA sequence
gggcuagauucccuaagaguga

SEQ ID NO: 10130 - RNA, 22 nt, Unknown
  Description of Unknown: Target viral genome RNA sequence
cgaacauaucguuuauggagau

SEQ ID NO: 10131 - RNA, 22 nt, Unknown
  Description of Unknown: Target viral genome RNA sequence
ucgaacauaucguuuauggaga

SEQ ID NO: 10132 - RNA, 22 nt, Unknown
  Description of Unknown: Target viral genome RNA sequence
ugccuucgaacauaucguuuau

SEQ ID NO: 10133 - RNA, 22 nt, Unknown
  Description of Unknown: Target viral genome RNA sequence
augccuucgaacauaucguuua

SEQ ID NO: 10134 - RNA, 22 nt, Unknown
  Description of Unknown: Target viral genome RNA sequence
uaugccuucgaacauaucguuu

SEQ ID NO: 10135 - RNA, 22 nt, Unknown
  Description of Unknown: Target viral genome RNA sequence
cuaugccuucgaacauaucguu

SEQ ID NO: 10136 - RNA, 22 nt, Unknown
  Description of Unknown: Target viral genome RNA sequence
uucgaacauaucguuuauggag

SEQ ID NO: 10137 - RNA, 22 nt, Unknown
  Description of Unknown: Target viral genome RNA sequence
cuucgaacauaucguuuaugga

SEQ ID NO: 10138 - RNA, 22 nt, Unknown
  Description of Unknown: Target viral genome RNA sequence
ccuucgaacauaucguuuaugg

SEQ ID NO: 10139 - RNA, 22 nt, Unknown
  Description of Unknown: Target viral genome RNA sequence
gccuucgaacauaucguuuaug

SEQ ID NO: 10140 - RNA, 22 nt, Unknown
  Description of Unknown: Target viral genome RNA sequence
gauucagaucuuaaugacuuug

SEQ ID NO: 10141 - RNA, 22 nt, Unknown
  Description of Unknown: Target viral genome RNA sequence
ucgauucagaucuuaaugacuu

SEQ ID NO: 10142 - RNA, 22 nt, Unknown
  Description of Unknown: Target viral genome RNA sequence
gucgauucagaucuuaaugacu

SEQ ID NO: 10143 - RNA, 22 nt, Unknown
  Description of Unknown: Target viral genome RNA sequence
ccaacgguacuauuaccguuga

SEQ ID NO: 10144 - RNA, 22 nt, Unknown
  Description of Unknown: Target viral genome RNA sequence
gcuugauguggcucagcuacuu

SEQ ID NO: 10145 - RNA, 22 nt, Unknown
  Description of Unknown: Target viral genome RNA sequence
cuugauguggcucagcuacuuc

SEQ ID NO: 10146 - RNA, 22 nt, Unknown
  Description of Unknown: Target viral genome RNA sequence
aggcuugauguggcucagcuac

SEQ ID NO: 10147 - RNA, 22 nt, Unknown
  Description of Unknown: Target viral genome RNA sequence
ggcuugauguggcucagcuacu

SEQ ID NO: 10148 - RNA, 22 nt, Unknown
  Description of Unknown: Target viral genome RNA sequence
acugaagguuuauguguugaca

SEQ ID NO: 10149 - RNA, 22 nt, Unknown
  Description of Unknown: Target viral genome RNA sequence
cugaagguuuauguguugacau

SEQ ID NO: 10150 - RNA, 22 nt, Unknown
  Description of Unknown: Target viral genome RNA sequence
ugaagguuuauguguugacaua

SEQ ID NO: 10151 - RNA, 22 nt, Unknown
  Description of Unknown: Target viral genome RNA sequence
gaagguuuauguguugacauac

SEQ ID NO: 10152 - RNA, 22 nt, Unknown
  Description of Unknown: Target viral genome RNA sequence
aagguuuauguguugacauacc

SEQ ID NO: 10153 - RNA, 22 nt, Unknown
  Description of Unknown: Target viral genome RNA sequence
gcugaaauuguugacacuguga

SEQ ID NO: 10154 - RNA, 22 nt, Unknown
  Description of Unknown: Target viral genome RNA sequence
cugaaauuguugacacugugag

SEQ ID NO: 10155 - RNA, 22 nt, Unknown
  Description of Unknown: Target viral genome RNA sequence
cugcugaaauuguugacacugu

SEQ ID NO: 10156 - RNA, 22 nt, Unknown
  Description of Unknown: Target viral genome RNA sequence
ugcugaaauuguugacacugug

SEQ ID NO: 10157 - RNA, 22 nt, Unknown
  Description of Unknown: Target viral genome RNA sequence
uccugcugaaauuguugacacu

SEQ ID NO: 10158 - RNA, 22 nt, Unknown
  Description of Unknown: Target viral genome RNA sequence
ccugcugaaauuguugacacug

SEQ ID NO: 10159 - RNA, 22 nt, Unknown
  Description of Unknown: Target viral genome RNA sequence
uguccugcugaaauuguugaca

SEQ ID NO: 10160 - RNA, 22 nt, Unknown
  Description of Unknown: Target viral genome RNA sequence
guccugcugaaauuguugacac

SEQ ID NO: 10161 - RNA, 22 nt, Unknown
  Description of Unknown: Target viral genome RNA sequence
ccagguugugaugucacagaug

SEQ ID NO: 10162 - RNA, 22 nt, Unknown
  Description of Unknown: Target viral genome RNA sequence
cagguugugaugucacagaugu

SEQ ID NO: 10163 - RNA, 22 nt, Unknown
  Description of Unknown: Target viral genome RNA sequence
uuuauuucaccuuauaauucac

SEQ ID NO: 10164 - RNA, 22 nt, Unknown
  Description of Unknown: Target viral genome RNA sequence
uuauuucaccuuauaauucaca

SEQ ID NO: 10165 - RNA, 22 nt, Unknown
  Description of Unknown: Target viral genome RNA sequence
uauuucaccuuauaauucacag

SEQ ID NO: 10166 - RNA, 22 nt, Unknown
  Description of Unknown: Target viral genome RNA sequence
uuucaccuuauaauucacagaa

SEQ ID NO: 10167 - RNA, 22 nt, Unknown
  Description of Unknown: Target viral genome RNA sequence
gcauucaguacggucguagugg

SEQ ID NO: 10168 - RNA, 22 nt, Unknown
  Description of Unknown: Target viral genome RNA sequence
cauucaguacggucguaguggu

SEQ ID NO: 10169 - RNA, 22 nt, Unknown
  Description of Unknown: Target viral genome RNA sequence
ucacuguugcuacaucacgaac

SEQ ID NO: 10170 - RNA, 22 nt, Unknown
  Description of Unknown: Target viral genome RNA sequence
aucacuguugcuacaucacgaa

SEQ ID NO: 10171 - RNA, 22 nt, Unknown
  Description of Unknown: Target viral genome RNA sequence
ugacccaaauguauaaacaggc

SEQ ID NO: 10172 - RNA, 22 nt, Unknown
  Description of Unknown: Target viral genome RNA sequence
cuaugacccaaauguauaaaca

SEQ ID NO: 10173 - RNA, 22 nt, Unknown
  Description of Unknown: Target viral genome RNA sequence
gcuaugacccaaauguauaaac

SEQ ID NO: 10174 - RNA, 22 nt, Unknown
  Description of Unknown: Target viral genome RNA sequence
augacccaaauguauaaacagg

SEQ ID NO: 10175 - RNA, 22 nt, Unknown
  Description of Unknown: Target viral genome RNA sequence
uaugacccaaauguauaaacag

SEQ ID NO: 10176 - RNA, 22 nt, Unknown
  Description of Unknown: Target viral genome RNA sequence
cacgcuuguuaaacaacuuagc

SEQ ID NO: 10177 - RNA, 22 nt, Unknown
  Description of Unknown: Target viral genome RNA sequence
acacgcuuguuaaacaacuuag

SEQ ID NO: 10178 - RNA, 22 nt, Unknown
  Description of Unknown: Target viral genome RNA sequence
cgcuuguuaaacaacuuagcuc

SEQ ID NO: 10179 - RNA, 22 nt, Unknown
  Description of Unknown: Target viral genome RNA sequence
cuacgugcuuuucaguagcugc

SEQ ID NO: 10180 - RNA, 22 nt, Unknown
  Description of Unknown: Target viral genome RNA sequence
uacgugcuuuucaguagcugca

SEQ ID NO: 10181 - RNA, 22 nt, Unknown
  Description of Unknown: Target viral genome RNA sequence
cacuacgugcuuuucaguagcu

SEQ ID NO: 10182 - RNA, 22 nt, Unknown
  Description of Unknown: Target viral genome RNA sequence
acuacgugcuuuucaguagcug

SEQ ID NO: 10183 - RNA, 22 nt, Unknown
  Description of Unknown: Target viral genome RNA sequence
cgcacuacgugcuuuucaguag

SEQ ID NO: 10184 - RNA, 22 nt, Unknown
  Description of Unknown: Target viral genome RNA sequence
gcacuacgugcuuuucaguagc

SEQ ID NO: 10185 - RNA, 22 nt, Unknown
  Description of Unknown: Target viral genome RNA sequence
aacgcacuacgugcuuuucagu

SEQ ID NO: 10186 - RNA, 22 nt, Unknown
  Description of Unknown: Target viral genome RNA sequence
acgcacuacgugcuuuucagua

SEQ ID NO: 10187 - RNA, 22 nt, Unknown
  Description of Unknown: Target viral genome RNA sequence
acgugcuuuucaguagcugcac

SEQ ID NO: 10188 - RNA, 22 nt, Unknown
  Description of Unknown: Target viral genome RNA sequence
cgugcuuuucaguagcugcacu

SEQ ID NO: 10189 - RNA, 22 nt, Unknown
  Description of Unknown: Target viral genome RNA sequence
gcauaaugaugaaugucgcaaa

SEQ ID NO: 10190 - RNA, 22 nt, Unknown
  Description of Unknown: Target viral genome RNA sequence
aaauauacucaacugugucaau

SEQ ID NO: 10191 - RNA, 22 nt, Unknown
  Description of Unknown: Target viral genome RNA sequence
aggcauaaugaugaaugucgca

SEQ ID NO: 10192 - RNA, 22 nt, Unknown
  Description of Unknown: Target viral genome RNA sequence
ggcauaaugaugaaugucgcaa

SEQ ID NO: 10193 - RNA, 22 nt, Unknown
  Description of Unknown: Target viral genome RNA sequence
aaaggcauaaugaugaaugucg

SEQ ID NO: 10194 - RNA, 22 nt, Unknown
  Description of Unknown: Target viral genome RNA sequence
aaggcauaaugaugaaugucgc

SEQ ID NO: 10195 - RNA, 22 nt, Unknown
  Description of Unknown: Target viral genome RNA sequence
aauauacucaacugugucaaua

SEQ ID NO: 10196 - RNA, 22 nt, Unknown
  Description of Unknown: Target viral genome RNA sequence
ggcugcuuacgguuucguccgu

SEQ ID NO: 10197 - RNA, 22 nt, Unknown
  Description of Unknown: Target viral genome RNA sequence
aggcugcuuacgguuucguccg

SEQ ID NO: 10198 - RNA, 22 nt, Unknown
  Description of Unknown: Target viral genome RNA sequence
cugcuuacgguuucguccgugu

SEQ ID NO: 10199 - RNA, 22 nt, Unknown
  Description of Unknown: Target viral genome RNA sequence
gcugcuuacgguuucguccgug

SEQ ID NO: 10200 - RNA, 22 nt, Unknown
  Description of Unknown: Target viral genome RNA sequence
gcuuacgguuucguccguguug

SEQ ID NO: 10201 - RNA, 22 nt, Unknown
  Description of Unknown: Target viral genome RNA sequence
ugcuuacgguuucguccguguu

SEQ ID NO: 10202 - RNA, 22 nt, Unknown
  Description of Unknown: Target viral genome RNA sequence
uaguacuuucuuuugaacuucu

SEQ ID NO: 10203 - RNA, 22 nt, Unknown
  Description of Unknown: Target viral genome RNA sequence
guaguacuuucuuuugaacuuc

SEQ ID NO: 10204 - RNA, 22 nt, Unknown
  Description of Unknown: Target viral genome RNA sequence
cagaguaguaguacuuucuuuu

SEQ ID NO: 10205 - RNA, 22 nt, Unknown
  Description of Unknown: Target viral genome RNA sequence
acagaguaguaguacuuucuuu

SEQ ID NO: 10206 - RNA, 22 nt, Unknown
  Description of Unknown: Target viral genome RNA sequence
gaguaguaguacuuucuuuuga

SEQ ID NO: 10207 - RNA, 22 nt, Unknown
  Description of Unknown: Target viral genome RNA sequence
agaguaguaguacuuucuuuug

SEQ ID NO: 10208 - RNA, 22 nt, Unknown
  Description of Unknown: Target viral genome RNA sequence
guaguaguacuuucuuuugaac

SEQ ID NO: 10209 - RNA, 22 nt, Unknown
  Description of Unknown: Target viral genome RNA sequence
aguaguaguacuuucuuuugaa

SEQ ID NO: 10210 - RNA, 22 nt, Unknown
  Description of Unknown: Target viral genome RNA sequence
aguaguacuuucuuuugaacuu

SEQ ID NO: 10211 - RNA, 22 nt, Unknown
  Description of Unknown: Target viral genome RNA sequence
uaguaguacuuucuuuugaacu

SEQ ID NO: 10212 - RNA, 22 nt, Unknown
  Description of Unknown: Target viral genome RNA sequence
uugcugauuauaauuauaaauu

SEQ ID NO: 10213 - RNA, 22 nt, Unknown
  Description of Unknown: Target viral genome RNA sequence
aagaagucuuugaauguggcua

SEQ ID NO: 10214 - RNA, 22 nt, Unknown
  Description of Unknown: Target viral genome RNA sequence
agaagucuuugaauguggcuaa

SEQ ID NO: 10215 - RNA, 22 nt, Unknown
  Description of Unknown: Target viral genome RNA sequence
guacauacagcuaauaaauggg

SEQ ID NO: 10216 - RNA, 22 nt, Unknown
  Description of Unknown: Target viral genome RNA sequence
uacauacagcuaauaaauggga

SEQ ID NO: 10217 - RNA, 22 nt, Unknown
  Description of Unknown: Target viral genome RNA sequence
guaguacuaugaccaauagaca

SEQ ID NO: 10218 - RNA, 22 nt, Unknown
  Description of Unknown: Target viral genome RNA sequence
uaguacuaugaccaauagacag

SEQ ID NO: 10219 - RNA, 22 nt, Unknown
  Description of Unknown: Target viral genome RNA sequence
cuguaguacuaugaccaauaga

SEQ ID NO: 10220 - RNA, 22 nt, Unknown
  Description of Unknown: Target viral genome RNA sequence
uguaguacuaugaccaauagac

SEQ ID NO: 10221 - RNA, 22 nt, Unknown
  Description of Unknown: Target viral genome RNA sequence
aucuguaguacuaugaccaaua

SEQ ID NO: 10222 - RNA, 22 nt, Unknown
  Description of Unknown: Target viral genome RNA sequence
ucuguaguacuaugaccaauag

SEQ ID NO: 10223 - RNA, 22 nt, Unknown
  Description of Unknown: Target viral genome RNA sequence
cuaucuguaguacuaugaccaa

SEQ ID NO: 10224 - RNA, 22 nt, Unknown
  Description of Unknown: Target viral genome RNA sequence
uaucuguaguacuaugaccaau

SEQ ID NO: 10225 - RNA, 22 nt, Unknown
  Description of Unknown: Target viral genome RNA sequence
cucuaucuguaguacuaugacc

SEQ ID NO: 10226 - RNA, 22 nt, Unknown
  Description of Unknown: Target viral genome RNA sequence
ucuaucuguaguacuaugacca

SEQ ID NO: 10227 - RNA, 22 nt, Unknown
  Description of Unknown: Target viral genome RNA sequence
ugugcuaaugacccuguggguu

SEQ ID NO: 10228 - RNA, 22 nt, Unknown
  Description of Unknown: Target viral genome RNA sequence
gugcuaaugacccuguggguuu

SEQ ID NO: 10229 - RNA, 22 nt, Unknown
  Description of Unknown: Target viral genome RNA sequence
ugcuaaugacccuguggguuuu

SEQ ID NO: 10230 - RNA, 22 nt, Unknown
  Description of Unknown: Target viral genome RNA sequence
gcuaaugacccuguggguuuua

SEQ ID NO: 10231 - RNA, 22 nt, Unknown
  Description of Unknown: Target viral genome RNA sequence
acuugugcuaaugacccugugg

SEQ ID NO: 10232 - RNA, 22 nt, Unknown
  Description of Unknown: Target viral genome RNA sequence
cuugugcuaaugacccuguggg

SEQ ID NO: 10233 - RNA, 22 nt, Unknown
  Description of Unknown: Target viral genome RNA sequence
uugugcuaaugacccugugggu

SEQ ID NO: 10234 - RNA, 22 nt, Unknown
  Description of Unknown: Target viral genome RNA sequence
cuaaugacccuguggguuuuac

SEQ ID NO: 10235 - RNA, 22 nt, Unknown
  Description of Unknown: Target viral genome RNA sequence
uaaugacccuguggguuuuaca

SEQ ID NO: 10236 - RNA, 22 nt, Unknown
  Description of Unknown: Target viral genome RNA sequence
uaugaugaaccgacgacgacua

SEQ ID NO: 10237 - RNA, 22 nt, Unknown
  Description of Unknown: Target viral genome RNA sequence
uuaugaugaaccgacgacgacu

SEQ ID NO: 10238 - RNA, 22 nt, Unknown
  Description of Unknown: Target viral genome RNA sequence
ccaauuuaugaugaaccgacga

SEQ ID NO: 10239 - RNA, 22 nt, Unknown
  Description of Unknown: Target viral genome RNA sequence
uuuaugaugaaccgacgacgac

SEQ ID NO: 10240 - RNA, 22 nt, Unknown
  Description of Unknown: Target viral genome RNA sequence
auuuaugaugaaccgacgacga

SEQ ID NO: 10241 - RNA, 22 nt, Unknown
  Description of Unknown: Target viral genome RNA sequence
aauuuaugaugaaccgacgacg

SEQ ID NO: 10242 - RNA, 22 nt, Unknown
  Description of Unknown: Target viral genome RNA sequence
caauuuaugaugaaccgacgac

SEQ ID NO: 10243 - RNA, 22 nt, Unknown
  Description of Unknown: Target viral genome RNA sequence
ccguuuacgauauauagucuac

SEQ ID NO: 10244 - RNA, 22 nt, Unknown
  Description of Unknown: Target viral genome RNA sequence
cguuuacgauauauagucuacu

SEQ ID NO: 10245 - RNA, 22 nt, Unknown
  Description of Unknown: Target viral genome RNA sequence
uuccguuuacgauauauagucu

SEQ ID NO: 10246 - RNA, 22 nt, Unknown
  Description of Unknown: Target viral genome RNA sequence
uccguuuacgauauauagucua

SEQ ID NO: 10247 - RNA, 22 nt, Unknown
  Description of Unknown: Target viral genome RNA sequence
ccgcaaauugcacaauuugccc

SEQ ID NO: 10248 - RNA, 22 nt, Unknown
  Description of Unknown: Target viral genome RNA sequence
cgcaaauugcacaauuugcccc

SEQ ID NO: 10249 - RNA, 22 nt, Unknown
  Description of Unknown: Target viral genome RNA sequence
ucuguaccgucugcgguaugug

SEQ ID NO: 10250 - RNA, 22 nt, Unknown
  Description of Unknown: Target viral genome RNA sequence
gucuguaccgucugcgguaugu

SEQ ID NO: 10251 - RNA, 22 nt, Unknown
  Description of Unknown: Target viral genome RNA sequence
acagucuguaccgucugcggua

SEQ ID NO: 10252 - RNA, 22 nt, Unknown
  Description of Unknown: Target viral genome RNA sequence
gaauguacaacuauuguuaaug

SEQ ID NO: 10253 - RNA, 22 nt, Unknown
  Description of Unknown: Target viral genome RNA sequence
aauguacaacuauuguuaaugg

SEQ ID NO: 10254 - RNA, 22 nt, Unknown
  Description of Unknown: Target viral genome RNA sequence
aaauuugcugaugauuuaaacc

SEQ ID NO: 10255 - RNA, 22 nt, Unknown
  Description of Unknown: Target viral genome RNA sequence
aauuugcugaugauuuaaacca

SEQ ID NO: 10256 - RNA, 22 nt, Unknown
  Description of Unknown: Target viral genome RNA sequence
cugaaacuuacuuuacucagag

SEQ ID NO: 10257 - RNA, 22 nt, Unknown
  Description of Unknown: Target viral genome RNA sequence
ccugaaacuuacuuuacucaga

SEQ ID NO: 10258 - RNA, 22 nt, Unknown
  Description of Unknown: Target viral genome RNA sequence
ugaugaugauuauuucaauaaa

SEQ ID NO: 10259 - RNA, 22 nt, Unknown
  Description of Unknown: Target viral genome RNA sequence
gugaugaugauuauuucaauaa

SEQ ID NO: 10260 - RNA, 22 nt, Unknown
  Description of Unknown: Target viral genome RNA sequence
guuauaaucuaccaacaaugug

SEQ ID NO: 10261 - RNA, 22 nt, Unknown
  Description of Unknown: Target viral genome RNA sequence
cguuauaaucuaccaacaaugu

SEQ ID NO: 10262 - RNA, 22 nt, Unknown
  Description of Unknown: Target viral genome RNA sequence
uaucguuauaaucuaccaacaa

SEQ ID NO: 10263 - RNA, 22 nt, Unknown
  Description of Unknown: Target viral genome RNA sequence
ucguuauaaucuaccaacaaug

SEQ ID NO: 10264 - RNA, 22 nt, Unknown
  Description of Unknown: Target viral genome RNA sequence
aucguuauaaucuaccaacaau

SEQ ID NO: 10265 - RNA, 22 nt, Unknown
  Description of Unknown: Target viral genome RNA sequence
caaagaauagagcucgcaccgu

SEQ ID NO: 10266 - RNA, 22 nt, Unknown
  Description of Unknown: Target viral genome RNA sequence
gcaaagaauagagcucgcaccg

SEQ ID NO: 10267 - RNA, 22 nt, Unknown
  Description of Unknown: Target viral genome RNA sequence
cauuagugcaaagaauagagcu

SEQ ID NO: 10268 - RNA, 22 nt, Unknown
  Description of Unknown: Target viral genome RNA sequence
ccauuagugcaaagaauagagc

SEQ ID NO: 10269 - RNA, 22 nt, Unknown
  Description of Unknown: Target viral genome RNA sequence
uuagugcaaagaauagagcucg

SEQ ID NO: 10270 - RNA, 22 nt, Unknown
  Description of Unknown: Target viral genome RNA sequence
auuagugcaaagaauagagcuc

SEQ ID NO: 10271 - RNA, 22 nt, Unknown
  Description of Unknown: Target viral genome RNA sequence
agugcaaagaauagagcucgca

SEQ ID NO: 10272 - RNA, 22 nt, Unknown
  Description of Unknown: Target viral genome RNA sequence
uagugcaaagaauagagcucgc

SEQ ID NO: 10273 - RNA, 22 nt, Unknown
  Description of Unknown: Target viral genome RNA sequence
ugcaaagaauagagcucgcacc

SEQ ID NO: 10274 - RNA, 22 nt, Unknown
  Description of Unknown: Target viral genome RNA sequence
gugcaaagaauagagcucgcac

SEQ ID NO: 10275 - RNA, 22 nt, Unknown
  Description of Unknown: Target viral genome RNA sequence
uugucuguuaauccguauguuu

SEQ ID NO: 10276 - RNA, 22 nt, Unknown
  Description of Unknown: Target viral genome RNA sequence
ugucuguuaauccguauguuug

SEQ ID NO: 10277 - RNA, 22 nt, Unknown
  Description of Unknown: Target viral genome RNA sequence
aauuagucuugucuguuaaucc

SEQ ID NO: 10278 - RNA, 22 nt, Unknown
  Description of Unknown: Target viral genome RNA sequence
ccauuaguuuuccauugugugc

SEQ ID NO: 10279 - RNA, 22 nt, Unknown
  Description of Unknown: Target viral genome RNA sequence
cauuaguuuuccauugugugcu

SEQ ID NO: 10280 - RNA, 22 nt, Unknown
  Description of Unknown: Target viral genome RNA sequence
auuaguuuuccauugugugcua

SEQ ID NO: 10281 - RNA, 22 nt, Unknown
  Description of Unknown: Target viral genome RNA sequence
uuaguuuuccauugugugcuaa

SEQ ID NO: 10282 - RNA, 22 nt, Unknown
  Description of Unknown: Target viral genome RNA sequence
cccauuaguuuuccauugugug

SEQ ID NO: 10283 - RNA, 22 nt, Unknown
  Description of Unknown: Target viral genome RNA sequence
acuauaaauuaaacacagacca

SEQ ID NO: 10284 - RNA, 22 nt, Unknown
  Description of Unknown: Target viral genome RNA sequence
uaguuuuccauugugugcuaau

SEQ ID NO: 10285 - RNA, 22 nt, Unknown
  Description of Unknown: Target viral genome RNA sequence
aguuuuccauugugugcuaaug

SEQ ID NO: 10286 - RNA, 22 nt, Unknown
  Description of Unknown: Target viral genome RNA sequence
uaagggcacacuagaaccagaa

SEQ ID NO: 10287 - RNA, 22 nt, Unknown
  Description of Unknown: Target viral genome RNA sequence
aagggcacacuagaaccagaau

SEQ ID NO: 10288 - RNA, 22 nt, Unknown
  Description of Unknown: Target viral genome RNA sequence
acuaagggcacacuagaaccag

SEQ ID NO: 10289 - RNA, 22 nt, Unknown
  Description of Unknown: Target viral genome RNA sequence
cuacaaguuuuggaccacuagu

SEQ ID NO: 10290 - RNA, 22 nt, Unknown
  Description of Unknown: Target viral genome RNA sequence
uacaaguuuuggaccacuagug

SEQ ID NO: 10291 - RNA, 22 nt, Unknown
  Description of Unknown: Target viral genome RNA sequence
accuacaaguuuuggaccacua

SEQ ID NO: 10292 - RNA, 22 nt, Unknown
  Description of Unknown: Target viral genome RNA sequence
ccuacaaguuuuggaccacuag

SEQ ID NO: 10293 - RNA, 22 nt, Unknown
  Description of Unknown: Target viral genome RNA sequence
caccuacaaguuuuggaccacu

SEQ ID NO: 10294 - RNA, 22 nt, Unknown
  Description of Unknown: Target viral genome RNA sequence
ucccaccuacaaguuuuggacc

SEQ ID NO: 10295 - RNA, 22 nt, Unknown
  Description of Unknown: Target viral genome RNA sequence
cccaccuacaaguuuuggacca

SEQ ID NO: 10296 - RNA, 22 nt, Unknown
  Description of Unknown: Target viral genome RNA sequence
acaaguuuuggaccacuaguga

SEQ ID NO: 10297 - RNA, 22 nt, Unknown
  Description of Unknown: Target viral genome RNA sequence
caaguuuuggaccacuagugag

SEQ ID NO: 10298 - RNA, 22 nt, Unknown
  Description of Unknown: Target viral genome RNA sequence
cggcacaggcacuaguacugau

SEQ ID NO: 10299 - RNA, 22 nt, Unknown
  Description of Unknown: Target viral genome RNA sequence
gacacugugagugcuuugguuu

SEQ ID NO: 10300 - RNA, 22 nt, Unknown
  Description of Unknown: Target viral genome RNA sequence
guuccugaucuucuggucuaaa

SEQ ID NO: 10301 - RNA, 22 nt, Unknown
  Description of Unknown: Target viral genome RNA sequence
uuccugaucuucuggucuaaac

SEQ ID NO: 10302 - RNA, 22 nt, Unknown
  Description of Unknown: Target viral genome RNA sequence
aagaaauucaacuccaggcagc

SEQ ID NO: 10303 - RNA, 22 nt, Unknown
  Description of Unknown: Target viral genome RNA sequence
uuaacauuugucaagcugucac

SEQ ID NO: 10304 - RNA, 22 nt, Unknown
  Description of Unknown: Target viral genome RNA sequence
uaggaccucuuucugcucaaac

SEQ ID NO: 10305 - RNA, 22 nt, Unknown
  Description of Unknown: Target viral genome RNA sequence
uuguuuuaauuaugcuuauuau

SEQ ID NO: 10306 - RNA, 22 nt, Unknown
  Description of Unknown: Target viral genome RNA sequence
cuuguuuuaauuaugcuuauua

SEQ ID NO: 10307 - RNA, 22 nt, Unknown
  Description of Unknown: Target viral genome RNA sequence
ccuuguuuuaauuaugcuuauu

SEQ ID NO: 10308 - RNA, 22 nt, Unknown
  Description of Unknown: Target viral genome RNA sequence
ccacuuacuaaacauccuaauc

SEQ ID NO: 10309 - RNA, 22 nt, Unknown
  Description of Unknown: Target viral genome RNA sequence
cccacuuacuaaacauccuaau

SEQ ID NO: 10310 - RNA, 22 nt, Unknown
  Description of Unknown: Target viral genome RNA sequence
acccacuuacuaaacauccuaa

SEQ ID NO: 10311 - RNA, 22 nt, Unknown
  Description of Unknown: Target viral genome RNA sequence
uacccacuuacuaaacauccua

SEQ ID NO: 10312 - RNA, 22 nt, Unknown
  Description of Unknown: Target viral genome RNA sequence
cuuacccacuuacuaaacaucc

SEQ ID NO: 10313 - RNA, 22 nt, Unknown
  Description of Unknown: Target viral genome RNA sequence
gcuuacccacuuacuaaacauc

SEQ ID NO: 10314 - RNA, 22 nt, Unknown
  Description of Unknown: Target viral genome RNA sequence
ugcuuacccacuuacuaaacau

SEQ ID NO: 10315 - RNA, 22 nt, Unknown
  Description of Unknown: Target viral genome RNA sequence
acuuacuaaacauccuaaucag

SEQ ID NO: 10316 - RNA, 22 nt, Unknown
  Description of Unknown: Target viral genome RNA sequence
cacuuacuaaacauccuaauca

SEQ ID NO: 10317 - RNA, 22 nt, Unknown
  Description of Unknown: Target viral genome RNA sequence
aguuuucuagcaauguugcaaa

SEQ ID NO: 10318 - RNA, 22 nt, Unknown
  Description of Unknown: Target viral genome RNA sequence
uuuucuagcaauguugcaaauu

SEQ ID NO: 10319 - RNA, 22 nt, Unknown
  Description of Unknown: Target viral genome RNA sequence
guuuucuagcaauguugcaaau

SEQ ID NO: 10320 - RNA, 22 nt, Unknown
  Description of Unknown: Target viral genome RNA sequence
uucuagcaauguugcaaauuau

SEQ ID NO: 10321 - RNA, 22 nt, Unknown
  Description of Unknown: Target viral genome RNA sequence
cuagcaauguugcaaauuauca

SEQ ID NO: 10322 - RNA, 22 nt, Unknown
  Description of Unknown: Target viral genome RNA sequence
ucuagcaauguugcaaauuauc

SEQ ID NO: 10323 - RNA, 22 nt, Unknown
  Description of Unknown: Target viral genome RNA sequence
agcaauguugcaaauuaucaaa

SEQ ID NO: 10324 - RNA, 22 nt, Unknown
  Description of Unknown: Target viral genome RNA sequence
uagcaauguugcaaauuaucaa

SEQ ID NO: 10325 - RNA, 22 nt, Unknown
  Description of Unknown: Target viral genome RNA sequence
gggaccaccugguacugguaag

SEQ ID NO: 10326 - RNA, 22 nt, Unknown
  Description of Unknown: Target viral genome RNA sequence
cuccagggaccaccugguacug

SEQ ID NO: 10327 - RNA, 22 nt, Unknown
  Description of Unknown: Target viral genome RNA sequence
acuccagggaccaccugguacu

SEQ ID NO: 10328 - RNA, 22 nt, Unknown
  Description of Unknown: Target viral genome RNA sequence
cuuuauuaugauucaaugaguu

SEQ ID NO: 10329 - RNA, 22 nt, Unknown
  Description of Unknown: Target viral genome RNA sequence
acuuuauuaugauucaaugagu

SEQ ID NO: 10330 - RNA, 22 nt, Unknown
  Description of Unknown: Target viral genome RNA sequence
aggcuagacuuuauuaugauuc

SEQ ID NO: 10331 - RNA, 22 nt, Unknown
  Description of Unknown: Target viral genome RNA sequence
aaggcuagacuuuauuaugauu

SEQ ID NO: 10332 - RNA, 22 nt, Unknown
  Description of Unknown: Target viral genome RNA sequence
gcuagacuuuauuaugauucaa

SEQ ID NO: 10333 - RNA, 22 nt, Unknown
  Description of Unknown: Target viral genome RNA sequence
ggcuagacuuuauuaugauuca

SEQ ID NO: 10334 - RNA, 22 nt, Unknown
  Description of Unknown: Target viral genome RNA sequence
uagacuuuauuaugauucaaug

SEQ ID NO: 10335 - RNA, 22 nt, Unknown
  Description of Unknown: Target viral genome RNA sequence
cuagacuuuauuaugauucaau

SEQ ID NO: 10336 - RNA, 22 nt, Unknown
  Description of Unknown: Target viral genome RNA sequence
gacuuuauuaugauucaaugag

SEQ ID NO: 10337 - RNA, 22 nt, Unknown
  Description of Unknown: Target viral genome RNA sequence
agacuuuauuaugauucaauga

SEQ ID NO: 10338 - RNA, 22 nt, Unknown
  Description of Unknown: Target viral genome RNA sequence
guucugauaaaggaguugcacc

SEQ ID NO: 10339 - RNA, 22 nt, Unknown
  Description of Unknown: Target viral genome RNA sequence
gguucugauaaaggaguugcac

SEQ ID NO: 10340 - RNA, 22 nt, Unknown
  Description of Unknown: Target viral genome RNA sequence
uggugcugguucugauaaagga

SEQ ID NO: 10341 - RNA, 22 nt, Unknown
  Description of Unknown: Target viral genome RNA sequence
gugcugguucugauaaaggagu

SEQ ID NO: 10342 - RNA, 22 nt, Unknown
  Description of Unknown: Target viral genome RNA sequence
ggugcugguucugauaaaggag

SEQ ID NO: 10343 - RNA, 22 nt, Unknown
  Description of Unknown: Target viral genome RNA sequence
gcugguucugauaaaggaguug

SEQ ID NO: 10344 - RNA, 22 nt, Unknown
  Description of Unknown: Target viral genome RNA sequence
ugcugguucugauaaaggaguu

SEQ ID NO: 10345 - RNA, 22 nt, Unknown
  Description of Unknown: Target viral genome RNA sequence
ugguucugauaaaggaguugca

SEQ ID NO: 10346 - RNA, 22 nt, Unknown
  Description of Unknown: Target viral genome RNA sequence
cugguucugauaaaggaguugc

SEQ ID NO: 10347 - RNA, 22 nt, Unknown
  Description of Unknown: Target viral genome RNA sequence
aaugugauagagccaugccuaa

SEQ ID NO: 10348 - RNA, 22 nt, Unknown
  Description of Unknown: Target viral genome RNA sequence
caacauacaaugcuaguuaaac

SEQ ID NO: 10349 - RNA, 22 nt, Unknown
  Description of Unknown: Target viral genome RNA sequence
aacauacaaugcuaguuaaaca

SEQ ID NO: 10350 - RNA, 22 nt, Unknown
  Description of Unknown: Target viral genome RNA sequence
uuagagugguaacaacuuuuga

SEQ ID NO: 10351 - RNA, 22 nt, Unknown
  Description of Unknown: Target viral genome RNA sequence
uagagugguaacaacuuuugau

SEQ ID NO: 10352 - RNA, 22 nt, Unknown
  Description of Unknown: Target viral genome RNA sequence
uguuagagugguaacaacuuuu

SEQ ID NO: 10353 - RNA, 22 nt, Unknown
  Description of Unknown: Target viral genome RNA sequence
guuagagugguaacaacuuuug

SEQ ID NO: 10354 - RNA, 22 nt, Unknown
  Description of Unknown: Target viral genome RNA sequence
ucuguuagagugguaacaacuu

SEQ ID NO: 10355 - RNA, 22 nt, Unknown
  Description of Unknown: Target viral genome RNA sequence
cuguuagagugguaacaacuuu

SEQ ID NO: 10356 - RNA, 22 nt, Unknown
  Description of Unknown: Target viral genome RNA sequence
guucuguuagagugguaacaac

SEQ ID NO: 10357 - RNA, 22 nt, Unknown
  Description of Unknown: Target viral genome RNA sequence
uucuguuagagugguaacaacu

SEQ ID NO: 10358 - RNA, 22 nt, Unknown
  Description of Unknown: Target viral genome RNA sequence
aauauggucuauaugccugcua

SEQ ID NO: 10359 - RNA, 22 nt, Unknown
  Description of Unknown: Target viral genome RNA sequence
uguugcuaauggugauucugaa

SEQ ID NO: 10360 - RNA, 22 nt, Unknown
  Description of Unknown: Target viral genome RNA sequence
guugcuaauggugauucugaag

SEQ ID NO: 10361 - RNA, 22 nt, Unknown
  Description of Unknown: Target viral genome RNA sequence
gcaggcuguugcuaauggugau

SEQ ID NO: 10362 - RNA, 22 nt, Unknown
  Description of Unknown: Target viral genome RNA sequence
caggcuguugcuaauggugauu

SEQ ID NO: 10363 - RNA, 22 nt, Unknown
  Description of Unknown: Target viral genome RNA sequence
gagcaggcuguugcuaauggug

SEQ ID NO: 10364 - RNA, 22 nt, Unknown
  Description of Unknown: Target viral genome RNA sequence
agcaggcuguugcuaaugguga

SEQ ID NO: 10365 - RNA, 22 nt, Unknown
  Description of Unknown: Target viral genome RNA sequence
gcuguugcuaauggugauucug

SEQ ID NO: 10366 - RNA, 22 nt, Unknown
  Description of Unknown: Target viral genome RNA sequence
cuguugcuaauggugauucuga

SEQ ID NO: 10367 - RNA, 22 nt, Unknown
  Description of Unknown: Target viral genome RNA sequence
aggcuguugcuaauggugauuc

SEQ ID NO: 10368 - RNA, 22 nt, Unknown
  Description of Unknown: Target viral genome RNA sequence
ggcuguugcuaauggugauucu

SEQ ID NO: 10369 - RNA, 22 nt, Unknown
  Description of Unknown: Target viral genome RNA sequence
uuauuaugauucaaugaguuau

SEQ ID NO: 10370 - RNA, 22 nt, Unknown
  Description of Unknown: Target viral genome RNA sequence
uuuauuaugauucaaugaguua

SEQ ID NO: 10371 - RNA, 22 nt, Unknown
  Description of Unknown: Target viral genome RNA sequence
auuaugauucaaugaguuauga

SEQ ID NO: 10372 - RNA, 22 nt, Unknown
  Description of Unknown: Target viral genome RNA sequence
uauuaugauucaaugaguuaug

SEQ ID NO: 10373 - RNA, 22 nt, Unknown
  Description of Unknown: Target viral genome RNA sequence
uaugauucaaugaguuaugagg

SEQ ID NO: 10374 - RNA, 22 nt, Unknown
  Description of Unknown: Target viral genome RNA sequence
uuaugauucaaugaguuaugag

SEQ ID NO: 10375 - RNA, 22 nt, Unknown
  Description of Unknown: Target viral genome RNA sequence
ugauucaaugaguuaugaggau

SEQ ID NO: 10376 - RNA, 22 nt, Unknown
  Description of Unknown: Target viral genome RNA sequence
augauucaaugaguuaugagga

SEQ ID NO: 10377 - RNA, 22 nt, Unknown
  Description of Unknown: Target viral genome RNA sequence
auucaaugaguuaugaggauca

SEQ ID NO: 10378 - RNA, 22 nt, Unknown
  Description of Unknown: Target viral genome RNA sequence
gauucaaugaguuaugaggauc

SEQ ID NO: 10379 - RNA, 22 nt, Unknown
  Description of Unknown: Target viral genome RNA sequence
cacucaacaacauuaucaacaa

SEQ ID NO: 10380 - RNA, 22 nt, Unknown
  Description of Unknown: Target viral genome RNA sequence
ucaacaacauuaucaacaaugc

SEQ ID NO: 10381 - RNA, 22 nt, Unknown
  Description of Unknown: Target viral genome RNA sequence
cucaacaacauuaucaacaaug

SEQ ID NO: 10382 - RNA, 22 nt, Unknown
  Description of Unknown: Target viral genome RNA sequence
gaagacucaucucuaugauggg

SEQ ID NO: 10383 - RNA, 22 nt, Unknown
  Description of Unknown: Target viral genome RNA sequence
agacucaucucuaugauggguu

SEQ ID NO: 10384 - RNA, 22 nt, Unknown
  Description of Unknown: Target viral genome RNA sequence
aagacucaucucuaugaugggu

SEQ ID NO: 10385 - RNA, 22 nt, Unknown
  Description of Unknown: Target viral genome RNA sequence
agucacaccuucgggaacgugg

SEQ ID NO: 10386 - RNA, 22 nt, Unknown
  Description of Unknown: Target viral genome RNA sequence
aagucacaccuucgggaacgug

SEQ ID NO: 10387 - RNA, 22 nt, Unknown
  Description of Unknown: Target viral genome RNA sequence
uggaagucacaccuucgggaac

SEQ ID NO: 10388 - RNA, 22 nt, Unknown
  Description of Unknown: Target viral genome RNA sequence
gaagucacaccuucgggaacgu

SEQ ID NO: 10389 - RNA, 22 nt, Unknown
  Description of Unknown: Target viral genome RNA sequence
ggaagucacaccuucgggaacg

SEQ ID NO: 10390 - RNA, 22 nt, Unknown
  Description of Unknown: Target viral genome RNA sequence
ugacagauugaaccagcuugag

SEQ ID NO: 10391 - RNA, 22 nt, Unknown
  Description of Unknown: Target viral genome RNA sequence
uugacagauugaaccagcuuga

SEQ ID NO: 10392 - RNA, 22 nt, Unknown
  Description of Unknown: Target viral genome RNA sequence
gcugcuugacagauugaaccag

SEQ ID NO: 10393 - RNA, 22 nt, Unknown
  Description of Unknown: Target viral genome RNA sequence
ugcugcuugacagauugaacca

SEQ ID NO: 10394 - RNA, 22 nt, Unknown
  Description of Unknown: Target viral genome RNA sequence
ugcuugacagauugaaccagcu

SEQ ID NO: 10395 - RNA, 22 nt, Unknown
  Description of Unknown: Target viral genome RNA sequence
cugcuugacagauugaaccagc

SEQ ID NO: 10396 - RNA, 22 nt, Unknown
  Description of Unknown: Target viral genome RNA sequence
cuugacagauugaaccagcuug

SEQ ID NO: 10397 - RNA, 22 nt, Unknown
  Description of Unknown: Target viral genome RNA sequence
gcuugacagauugaaccagcuu

SEQ ID NO: 10398 - RNA, 22 nt, Unknown
  Description of Unknown: Target viral genome RNA sequence
uuuacaccuuuugauguuguua

SEQ ID NO: 10399 - RNA, 22 nt, Unknown
  Description of Unknown: Target viral genome RNA sequence
gcgguguaagugcagcccgucu

SEQ ID NO: 10400 - RNA, 22 nt, Unknown
  Description of Unknown: Target viral genome RNA sequence
cgguguaagugcagcccgucuu

SEQ ID NO: 10401 - RNA, 22 nt, Unknown
  Description of Unknown: Target viral genome RNA sequence
guuugcgguguaagugcagccc

SEQ ID NO: 10402 - RNA, 22 nt, Unknown
  Description of Unknown: Target viral genome RNA sequence
uuugcgguguaagugcagcccg

SEQ ID NO: 10403 - RNA, 22 nt, Unknown
  Description of Unknown: Target viral genome RNA sequence
uugcgguguaagugcagcccgu

SEQ ID NO: 10404 - RNA, 22 nt, Unknown
  Description of Unknown: Target viral genome RNA sequence
ugcgguguaagugcagcccguc

SEQ ID NO: 10405 - RNA, 22 nt, Unknown
  Description of Unknown: Target viral genome RNA sequence
acggguuugcgguguaagugca

SEQ ID NO: 10406 - RNA, 22 nt, Unknown
  Description of Unknown: Target viral genome RNA sequence
cggguuugcgguguaagugcag

SEQ ID NO: 10407 - RNA, 22 nt, Unknown
  Description of Unknown: Target viral genome RNA sequence
ggguuugcgguguaagugcagc

SEQ ID NO: 10408 - RNA, 22 nt, Unknown
  Description of Unknown: Target viral genome RNA sequence
gguuugcgguguaagugcagcc

SEQ ID NO: 10409 - RNA, 22 nt, Unknown
  Description of Unknown: Target viral genome RNA sequence
ugacauuagauaaucaagaucu

SEQ ID NO: 10410 - RNA, 22 nt, Unknown
  Description of Unknown: Target viral genome RNA sequence
guaagugacaacagauguuuca

SEQ ID NO: 10411 - RNA, 22 nt, Unknown
  Description of Unknown: Target viral genome RNA sequence
uaagugacaacagauguuucau

SEQ ID NO: 10412 - RNA, 22 nt, Unknown
  Description of Unknown: Target viral genome RNA sequence
caguaagugacaacagauguuu

SEQ ID NO: 10413 - RNA, 22 nt, Unknown
  Description of Unknown: Target viral genome RNA sequence
aguaagugacaacagauguuuc

SEQ ID NO: 10414 - RNA, 22 nt, Unknown
  Description of Unknown: Target viral genome RNA sequence
gugacaacagauguuucaucuc

SEQ ID NO: 10415 - RNA, 22 nt, Unknown
  Description of Unknown: Target viral genome RNA sequence
ugacaacagauguuucaucucg

SEQ ID NO: 10416 - RNA, 22 nt, Unknown
  Description of Unknown: Target viral genome RNA sequence
aagugacaacagauguuucauc

SEQ ID NO: 10417 - RNA, 22 nt, Unknown
  Description of Unknown: Target viral genome RNA sequence
agugacaacagauguuucaucu

SEQ ID NO: 10418 - RNA, 22 nt, Unknown
  Description of Unknown: Target viral genome RNA sequence
gacaacagauguuucaucucgu

SEQ ID NO: 10419 - RNA, 22 nt, Unknown
  Description of Unknown: Target viral genome RNA sequence
acaacagauguuucaucucguu

SEQ ID NO: 10420 - RNA, 22 nt, Unknown
  Description of Unknown: Target viral genome RNA sequence
uuggcgacccugcucaauuacc

SEQ ID NO: 10421 - RNA, 22 nt, Unknown
  Description of Unknown: Target viral genome RNA sequence
auuggcgacccugcucaauuac

SEQ ID NO: 10422 - RNA, 22 nt, Unknown
  Description of Unknown: Target viral genome RNA sequence
ggauguaaacuuacauagcucu

SEQ ID NO: 10423 - RNA, 22 nt, Unknown
  Description of Unknown: Target viral genome RNA sequence
aggauguaaacuuacauagcuc

SEQ ID NO: 10424 - RNA, 22 nt, Unknown
  Description of Unknown: Target viral genome RNA sequence
cauaaucaggauguaaacuuac

SEQ ID NO: 10425 - RNA, 22 nt, Unknown
  Description of Unknown: Target viral genome RNA sequence
acauaaucaggauguaaacuua

SEQ ID NO: 10426 - RNA, 22 nt, Unknown
  Description of Unknown: Target viral genome RNA sequence
uaaucaggauguaaacuuacau

SEQ ID NO: 10427 - RNA, 22 nt, Unknown
  Description of Unknown: Target viral genome RNA sequence
auaaucaggauguaaacuuaca

SEQ ID NO: 10428 - RNA, 22 nt, Unknown
  Description of Unknown: Target viral genome RNA sequence
aucaggauguaaacuuacauag

SEQ ID NO: 10429 - RNA, 22 nt, Unknown
  Description of Unknown: Target viral genome RNA sequence
aaucaggauguaaacuuacaua

SEQ ID NO: 10430 - RNA, 22 nt, Unknown
  Description of Unknown: Target viral genome RNA sequence
caggauguaaacuuacauagcu

SEQ ID NO: 10431 - RNA, 22 nt, Unknown
  Description of Unknown: Target viral genome RNA sequence
ucaggauguaaacuuacauagc

SEQ ID NO: 10432 - RNA, 22 nt, Unknown
  Description of Unknown: Target viral genome RNA sequence
gcugccuauauggaagagcccu

SEQ ID NO: 10433 - RNA, 22 nt, Unknown
  Description of Unknown: Target viral genome RNA sequence
agcugccuauauggaagagccc

SEQ ID NO: 10434 - RNA, 22 nt, Unknown
  Description of Unknown: Target viral genome RNA sequence
gagcugccuauauggaagagcc

SEQ ID NO: 10435 - RNA, 22 nt, Unknown
  Description of Unknown: Target viral genome RNA sequence
agagcugccuauauggaagagc

SEQ ID NO: 10436 - RNA, 22 nt, Unknown
  Description of Unknown: Target viral genome RNA sequence
ccuauauggaagagcccuaaug

SEQ ID NO: 10437 - RNA, 22 nt, Unknown
  Description of Unknown: Target viral genome RNA sequence
gccuauauggaagagcccuaau

SEQ ID NO: 10438 - RNA, 22 nt, Unknown
  Description of Unknown: Target viral genome RNA sequence
ugccuauauggaagagcccuaa

SEQ ID NO: 10439 - RNA, 22 nt, Unknown
  Description of Unknown: Target viral genome RNA sequence
cugccuauauggaagagcccua

SEQ ID NO: 10440 - RNA, 22 nt, Unknown
  Description of Unknown: Target viral genome RNA sequence
uauauggaagagcccuaaugug

SEQ ID NO: 10441 - RNA, 22 nt, Unknown
  Description of Unknown: Target viral genome RNA sequence
gcguugcacuucuugcuguuuu

SEQ ID NO: 10442 - RNA, 22 nt, Unknown
  Description of Unknown: Target viral genome RNA sequence
ggcguugcacuucuugcuguuu

SEQ ID NO: 10443 - RNA, 22 nt, Unknown
  Description of Unknown: Target viral genome RNA sequence
cugcuaaucuugcugcuacuaa

SEQ ID NO: 10444 - RNA, 22 nt, Unknown
  Description of Unknown: Target viral genome RNA sequence
cacuaagaaaucugcugcugag

SEQ ID NO: 10445 - RNA, 22 nt, Unknown
  Description of Unknown: Target viral genome RNA sequence
acuaagaaaucugcugcugagg

SEQ ID NO: 10446 - RNA, 22 nt, Unknown
  Description of Unknown: Target viral genome RNA sequence
gucacuaagaaaucugcugcug

SEQ ID NO: 10447 - RNA, 22 nt, Unknown
  Description of Unknown: Target viral genome RNA sequence
ucacuaagaaaucugcugcuga

SEQ ID NO: 10448 - RNA, 22 nt, Unknown
  Description of Unknown: Target viral genome RNA sequence
cugucacuaagaaaucugcugc

SEQ ID NO: 10449 - RNA, 22 nt, Unknown
  Description of Unknown: Target viral genome RNA sequence
aacugucacuaagaaaucugcu

SEQ ID NO: 10450 - RNA, 22 nt, Unknown
  Description of Unknown: Target viral genome RNA sequence
acugucacuaagaaaucugcug

SEQ ID NO: 10451 - RNA, 22 nt, Unknown
  Description of Unknown: Target viral genome RNA sequence
cuaagaaaucugcugcugaggc

SEQ ID NO: 10452 - RNA, 22 nt, Unknown
  Description of Unknown: Target viral genome RNA sequence
uaagaaaucugcugcugaggcu

SEQ ID NO: 10453 - RNA, 22 nt, Unknown
  Description of Unknown: Target viral genome RNA sequence
agcuucugcuaaucuugcugcu

SEQ ID NO: 10454 - RNA, 22 nt, Unknown
  Description of Unknown: Target viral genome RNA sequence
gcuucugcuaaucuugcugcua

SEQ ID NO: 10455 - RNA, 22 nt, Unknown
  Description of Unknown: Target viral genome RNA sequence
cuucugcuaaucuugcugcuac

SEQ ID NO: 10456 - RNA, 22 nt, Unknown
  Description of Unknown: Target viral genome RNA sequence
uucugcuaaucuugcugcuacu

SEQ ID NO: 10457 - RNA, 22 nt, Unknown
  Description of Unknown: Target viral genome RNA sequence
guguuuuuaacauuugucaagc

SEQ ID NO: 10458 - RNA, 22 nt, Unknown
  Description of Unknown: Target viral genome RNA sequence
uguuuuuaacauuugucaagcu

SEQ ID NO: 10459 - RNA, 22 nt, Unknown
  Description of Unknown: Target viral genome RNA sequence
guuuuuaacauuugucaagcug

SEQ ID NO: 10460 - RNA, 22 nt, Unknown
  Description of Unknown: Target viral genome RNA sequence
uuuuuaacauuugucaagcugu

SEQ ID NO: 10461 - RNA, 22 nt, Unknown
  Description of Unknown: Target viral genome RNA sequence
aguguuuuuaacauuugucaag

SEQ ID NO: 10462 - RNA, 22 nt, Unknown
  Description of Unknown: Target viral genome RNA sequence
uuuaacauuugucaagcuguca

SEQ ID NO: 10463 - RNA, 22 nt, Unknown
  Description of Unknown: Target viral genome RNA sequence
gauucccuaagagugauggaac

SEQ ID NO: 10464 - RNA, 22 nt, Unknown
  Description of Unknown: Target viral genome RNA sequence
gcuagauucccuaagagugaug

SEQ ID NO: 10465 - RNA, 22 nt, Unknown
  Description of Unknown: Target viral genome RNA sequence
cuagauucccuaagagugaugg

SEQ ID NO: 10466 - RNA, 22 nt, Unknown
  Description of Unknown: Target viral genome RNA sequence
uagauucccuaagagugaugga

SEQ ID NO: 10467 - RNA, 22 nt, Unknown
  Description of Unknown: Target viral genome RNA sequence
agauucccuaagagugauggaa

SEQ ID NO: 10468 - RNA, 22 nt, Unknown
  Description of Unknown: Target viral genome RNA sequence
uuuaagucaguucuuuauuauc

SEQ ID NO: 10469 - RNA, 22 nt, Unknown
  Description of Unknown: Target viral genome RNA sequence
cuuuaagucaguucuuuauuau

SEQ ID NO: 10470 - RNA, 22 nt, Unknown
  Description of Unknown: Target viral genome RNA sequence
uaagucaguucuuuauuaucaa

SEQ ID NO: 10471 - RNA, 22 nt, Unknown
  Description of Unknown: Target viral genome RNA sequence
uuaagucaguucuuuauuauca

SEQ ID NO: 10472 - RNA, 22 nt, Unknown
  Description of Unknown: Target viral genome RNA sequence
ugguggcuguauuaaugcuaac

SEQ ID NO: 10473 - RNA, 22 nt, Unknown
  Description of Unknown: Target viral genome RNA sequence
augguggcuguauuaaugcuaa

SEQ ID NO: 10474 - RNA, 22 nt, Unknown
  Description of Unknown: Target viral genome RNA sequence
guggcuguauuaaugcuaacca

SEQ ID NO: 10475 - RNA, 22 nt, Unknown
  Description of Unknown: Target viral genome RNA sequence
gguggcuguauuaaugcuaacc

SEQ ID NO: 10476 - RNA, 22 nt, Unknown
  Description of Unknown: Target viral genome RNA sequence
ggcuguauuaaugcuaaccaag

SEQ ID NO: 10477 - RNA, 22 nt, Unknown
  Description of Unknown: Target viral genome RNA sequence
uggcuguauuaaugcuaaccaa

SEQ ID NO: 10478 - RNA, 22 nt, Unknown
  Description of Unknown: Target viral genome RNA sequence
gcuguauuaaugcuaaccaagu

SEQ ID NO: 10479 - RNA, 22 nt, Unknown
  Description of Unknown: Target viral genome RNA sequence
auuuucaccgaggccacgcgga

SEQ ID NO: 10480 - RNA, 22 nt, Unknown
  Description of Unknown: Target viral genome RNA sequence
uuuucaccgaggccacgcggag

SEQ ID NO: 10481 - RNA, 22 nt, Unknown
  Description of Unknown: Target viral genome RNA sequence
acauuuucaccgaggccacgcg

SEQ ID NO: 10482 - RNA, 22 nt, Unknown
  Description of Unknown: Target viral genome RNA sequence
cauuuucaccgaggccacgcgg

SEQ ID NO: 10483 - RNA, 22 nt, Unknown
  Description of Unknown: Target viral genome RNA sequence
ccacauuuucaccgaggccacg

SEQ ID NO: 10484 - RNA, 22 nt, Unknown
  Description of Unknown: Target viral genome RNA sequence
cacauuuucaccgaggccacgc

SEQ ID NO: 10485 - RNA, 22 nt, Unknown
  Description of Unknown: Target viral genome RNA sequence
caccacauuuucaccgaggcca

SEQ ID NO: 10486 - RNA, 22 nt, Unknown
  Description of Unknown: Target viral genome RNA sequence
accacauuuucaccgaggccac

SEQ ID NO: 10487 - RNA, 22 nt, Unknown
  Description of Unknown: Target viral genome RNA sequence
uuucaccgaggccacgcggagu

SEQ ID NO: 10488 - RNA, 22 nt, Unknown
  Description of Unknown: Target viral genome RNA sequence
uucaccgaggccacgcggagua

SEQ ID NO: 10489 - RNA, 22 nt, Unknown
  Description of Unknown: Target viral genome RNA sequence
caacgguacuauuaccguugaa

SEQ ID NO: 10490 - RNA, 22 nt, Unknown
  Description of Unknown: Target viral genome RNA sequence
aacgguacuauuaccguugaag

SEQ ID NO: 10491 - RNA, 22 nt, Unknown
  Description of Unknown: Target viral genome RNA sequence
acgguacuauuaccguugaaga

SEQ ID NO: 10492 - RNA, 22 nt, Unknown
  Description of Unknown: Target viral genome RNA sequence
gguacuauuaccguugaagagc

SEQ ID NO: 10493 - RNA, 22 nt, Unknown
  Description of Unknown: Target viral genome RNA sequence
guacuauuaccguugaagagcu

SEQ ID NO: 10494 - RNA, 22 nt, Unknown
  Description of Unknown: Target viral genome RNA sequence
uacuauuaccguugaagagcuu

SEQ ID NO: 10495 - RNA, 22 nt, Unknown
  Description of Unknown: Target viral genome RNA sequence
acuauuaccguugaagagcuua

SEQ ID NO: 10496 - RNA, 22 nt, Unknown
  Description of Unknown: Target viral genome RNA sequence
cuauuaccguugaagagcuuaa

SEQ ID NO: 10497 - RNA, 22 nt, Unknown
  Description of Unknown: Target viral genome RNA sequence
uauuaccguugaagagcuuaaa

SEQ ID NO: 10498 - RNA, 22 nt, Unknown
  Description of Unknown: Target viral genome RNA sequence
aaugcuuuagaucaagccauuu

SEQ ID NO: 10499 - RNA, 22 nt, Unknown
  Description of Unknown: Target viral genome RNA sequence
augcuuuagaucaagccauuuc

SEQ ID NO: 10500 - RNA, 22 nt, Unknown
  Description of Unknown: Target viral genome RNA sequence
guaaugcuuuagaucaagccau

SEQ ID NO: 10501 - RNA, 22 nt, Unknown
  Description of Unknown: Target viral genome RNA sequence
uaaugcuuuagaucaagccauu

SEQ ID NO: 10502 - RNA, 22 nt, Unknown
  Description of Unknown: Target viral genome RNA sequence
ugguaaugcuuuagaucaagcc

SEQ ID NO: 10503 - RNA, 22 nt, Unknown
  Description of Unknown: Target viral genome RNA sequence
gguaaugcuuuagaucaagcca

SEQ ID NO: 10504 - RNA, 22 nt, Unknown
  Description of Unknown: Target viral genome RNA sequence
uaugguaaugcuuuagaucaag

SEQ ID NO: 10505 - RNA, 22 nt, Unknown
  Description of Unknown: Target viral genome RNA sequence
augguaaugcuuuagaucaagc

SEQ ID NO: 10506 - RNA, 22 nt, Unknown
  Description of Unknown: Target viral genome RNA sequence
ugcuuuagaucaagccauuucc

SEQ ID NO: 10507 - RNA, 22 nt, Unknown
  Description of Unknown: Target viral genome RNA sequence
gcuuuagaucaagccauuucca

SEQ ID NO: 10508 - RNA, 22 nt, Unknown
  Description of Unknown: Target viral genome RNA sequence
ggcuacuaccgaagagcuacca

SEQ ID NO: 10509 - RNA, 22 nt, Unknown
  Description of Unknown: Target viral genome RNA sequence
gcuacuaccgaagagcuaccag

SEQ ID NO: 10510 - RNA, 22 nt, Unknown
  Description of Unknown: Target viral genome RNA sequence
cuacuaccgaagagcuaccaga

SEQ ID NO: 10511 - RNA, 22 nt, Unknown
  Description of Unknown: Target viral genome RNA sequence
uacuaccgaagagcuaccagac

SEQ ID NO: 10512 - RNA, 22 nt, Unknown
  Description of Unknown: Target viral genome RNA sequence
aauuggcuacuaccgaagagcu

SEQ ID NO: 10513 - RNA, 22 nt, Unknown
  Description of Unknown: Target viral genome RNA sequence
auuggcuacuaccgaagagcua

SEQ ID NO: 10514 - RNA, 22 nt, Unknown
  Description of Unknown: Target viral genome RNA sequence
uuggcuacuaccgaagagcuac

SEQ ID NO: 10515 - RNA, 22 nt, Unknown
  Description of Unknown: Target viral genome RNA sequence
uggcuacuaccgaagagcuacc

SEQ ID NO: 10516 - RNA, 22 nt, Unknown
  Description of Unknown: Target viral genome RNA sequence
acuaccgaagagcuaccagacg

SEQ ID NO: 10517 - RNA, 22 nt, Unknown
  Description of Unknown: Target viral genome RNA sequence
cuaccgaagagcuaccagacga

SEQ ID NO: 10518 - RNA, 22 nt, Unknown
  Description of Unknown: Target viral genome RNA sequence
auucaacauuagaacaguaugu

SEQ ID NO: 10519 - RNA, 22 nt, Unknown
  Description of Unknown: Target viral genome RNA sequence
gaauucaacauuagaacaguau

SEQ ID NO: 10520 - RNA, 22 nt, Unknown
  Description of Unknown: Target viral genome RNA sequence
aauucaacauuagaacaguaug

SEQ ID NO: 10521 - RNA, 22 nt, Unknown
  Description of Unknown: Target viral genome RNA sequence
ccuacacaggcaccuacacacc

SEQ ID NO: 10522 - RNA, 22 nt, Unknown
  Description of Unknown: Target viral genome RNA sequence
uccuacacaggcaccuacacac

SEQ ID NO: 10523 - RNA, 22 nt, Unknown
  Description of Unknown: Target viral genome RNA sequence
auccuacacaggcaccuacaca

SEQ ID NO: 10524 - RNA, 22 nt, Unknown
  Description of Unknown: Target viral genome RNA sequence
cauccuacacaggcaccuacac

SEQ ID NO: 10525 - RNA, 22 nt, Unknown
  Description of Unknown: Target viral genome RNA sequence
acauccuacacaggcaccuaca

SEQ ID NO: 10526 - RNA, 22 nt, Unknown
  Description of Unknown: Target viral genome RNA sequence
uacauccuacacaggcaccuac

SEQ ID NO: 10527 - RNA, 22 nt, Unknown
  Description of Unknown: Target viral genome RNA sequence
uagauaaauguaguagaauuau

SEQ ID NO: 10528 - RNA, 22 nt, Unknown
  Description of Unknown: Target viral genome RNA sequence
agauaaauguaguagaauuaua

SEQ ID NO: 10529 - RNA, 22 nt, Unknown
  Description of Unknown: Target viral genome RNA sequence
ugcaauuuacaagucuugaaau

SEQ ID NO: 10530 - RNA, 22 nt, Unknown
  Description of Unknown: Target viral genome RNA sequence
auucccaccaacagagccuaaa

SEQ ID NO: 10531 - RNA, 22 nt, Unknown
  Description of Unknown: Target viral genome RNA sequence
gauaaauguaguagaauuauac

SEQ ID NO: 10532 - RNA, 22 nt, Unknown
  Description of Unknown: Target viral genome RNA sequence
auaaauguaguagaauuauacc

SEQ ID NO: 10533 - RNA, 22 nt, Unknown
  Description of Unknown: Target viral genome RNA sequence
ucuaacuaccaacaugaagaaa

SEQ ID NO: 10534 - RNA, 22 nt, Unknown
  Description of Unknown: Target viral genome RNA sequence
cuaacuaccaacaugaagaaac

SEQ ID NO: 10535 - RNA, 22 nt, Unknown
  Description of Unknown: Target viral genome RNA sequence
ucucuaacuaccaacaugaaga

SEQ ID NO: 10536 - RNA, 22 nt, Unknown
  Description of Unknown: Target viral genome RNA sequence
uugauuguuacgaugguggcug

SEQ ID NO: 10537 - RNA, 22 nt, Unknown
  Description of Unknown: Target viral genome RNA sequence
ugauuguuacgaugguggcugu

SEQ ID NO: 10538 - RNA, 22 nt, Unknown
  Description of Unknown: Target viral genome RNA sequence
uacuuugauuguuacgauggug

SEQ ID NO: 10539 - RNA, 22 nt, Unknown
  Description of Unknown: Target viral genome RNA sequence
acuuugauuguuacgauggugg

SEQ ID NO: 10540 - RNA, 22 nt, Unknown
  Description of Unknown: Target viral genome RNA sequence
cuuugauuguuacgaugguggc

SEQ ID NO: 10541 - RNA, 22 nt, Unknown
  Description of Unknown: Target viral genome RNA sequence
uuugauuguuacgaugguggcu

SEQ ID NO: 10542 - RNA, 22 nt, Unknown
  Description of Unknown: Target viral genome RNA sequence
uaaguacuuugauuguuacgau

SEQ ID NO: 10543 - RNA, 22 nt, Unknown
  Description of Unknown: Target viral genome RNA sequence
aaguacuuugauuguuacgaug

SEQ ID NO: 10544 - RNA, 22 nt, Unknown
  Description of Unknown: Target viral genome RNA sequence
aguacuuugauuguuacgaugg

SEQ ID NO: 10545 - RNA, 22 nt, Unknown
  Description of Unknown: Target viral genome RNA sequence
guacuuugauuguuacgauggu

SEQ ID NO: 10546 - RNA, 22 nt, Unknown
  Description of Unknown: Target viral genome RNA sequence
aagacuucuaugacuuugcugu

SEQ ID NO: 10547 - RNA, 22 nt, Unknown
  Description of Unknown: Target viral genome RNA sequence
cuauggugaugcuguuguuuac

SEQ ID NO: 10548 - RNA, 22 nt, Unknown
  Description of Unknown: Target viral genome RNA sequence
ggaagagacagguacguuaaua

SEQ ID NO: 10549 - RNA, 22 nt, Unknown
  Description of Unknown: Target viral genome RNA sequence
uuguuaugaugucagcaccacc

SEQ ID NO: 10550 - RNA, 22 nt, Unknown
  Description of Unknown: Target viral genome RNA sequence
uggaaagguuauggcuguaguu

SEQ ID NO: 10551 - RNA, 22 nt, Unknown
  Description of Unknown: Target viral genome RNA sequence
ggaaagguuauggcuguaguug

SEQ ID NO: 10552 - RNA, 22 nt, Unknown
  Description of Unknown: Target viral genome RNA sequence
gaaagguuauggcuguaguugu

SEQ ID NO: 10553 - RNA, 22 nt, Unknown
  Description of Unknown: Target viral genome RNA sequence
aaagguuauggcuguaguugug

SEQ ID NO: 10554 - RNA, 22 nt, Unknown
  Description of Unknown: Target viral genome RNA sequence
uauguggaaagguuauggcugu

SEQ ID NO: 10555 - RNA, 22 nt, Unknown
  Description of Unknown: Target viral genome RNA sequence
auguggaaagguuauggcugua

SEQ ID NO: 10556 - RNA, 22 nt, Unknown
  Description of Unknown: Target viral genome RNA sequence
uguggaaagguuauggcuguag

SEQ ID NO: 10557 - RNA, 22 nt, Unknown
  Description of Unknown: Target viral genome RNA sequence
guggaaagguuauggcuguagu

SEQ ID NO: 10558 - RNA, 22 nt, Unknown
  Description of Unknown: Target viral genome RNA sequence
aagguuauggcuguaguuguga

SEQ ID NO: 10559 - RNA, 22 nt, Unknown
  Description of Unknown: Target viral genome RNA sequence
agguuauggcuguaguugugau

SEQ ID NO: 10560 - RNA, 22 nt, Unknown
  Description of Unknown: Target viral genome RNA sequence
aaggaccucaugaauuuugcuc

SEQ ID NO: 10561 - RNA, 22 nt, Unknown
  Description of Unknown: Target viral genome RNA sequence
aaaggaccucaugaauuuugcu

SEQ ID NO: 10562 - RNA, 22 nt, Unknown
  Description of Unknown: Target viral genome RNA sequence
acuaaaggaccucaugaauuuu

SEQ ID NO: 10563 - RNA, 22 nt, Unknown
  Description of Unknown: Target viral genome RNA sequence
uacuaaaggaccucaugaauuu

SEQ ID NO: 10564 - RNA, 22 nt, Unknown
  Description of Unknown: Target viral genome RNA sequence
uaaaggaccucaugaauuuugc

SEQ ID NO: 10565 - RNA, 22 nt, Unknown
  Description of Unknown: Target viral genome RNA sequence
cuaaaggaccucaugaauuuug

SEQ ID NO: 10566 - RNA, 22 nt, Unknown
  Description of Unknown: Target viral genome RNA sequence
gagugcuuuguuaagcguguug

SEQ ID NO: 10567 - RNA, 22 nt, Unknown
  Description of Unknown: Target viral genome RNA sequence
agugcuuuguuaagcguguuga

SEQ ID NO: 10568 - RNA, 22 nt, Unknown
  Description of Unknown: Target viral genome RNA sequence
gaucaagcuaugacccaaaugu

SEQ ID NO: 10569 - RNA, 22 nt, Unknown
  Description of Unknown: Target viral genome RNA sequence
aucaagcuaugacccaaaugua

SEQ ID NO: 10570 - RNA, 22 nt, Unknown
  Description of Unknown: Target viral genome RNA sequence
uuucgugguauucuugcuaguu

SEQ ID NO: 10571 - RNA, 22 nt, Unknown
  Description of Unknown: Target viral genome RNA sequence
cuuucgugguauucuugcuagu

SEQ ID NO: 10572 - RNA, 22 nt, Unknown
  Description of Unknown: Target viral genome RNA sequence
gcuuucgugguauucuugcuag

SEQ ID NO: 10573 - RNA, 22 nt, Unknown
  Description of Unknown: Target viral genome RNA sequence
ugcuuucgugguauucuugcua

SEQ ID NO: 10574 - RNA, 22 nt, Unknown
  Description of Unknown: Target viral genome RNA sequence
uugcuuucgugguauucuugcu

SEQ ID NO: 10575 - RNA, 22 nt, Unknown
  Description of Unknown: Target viral genome RNA sequence
cuugcuuucgugguauucuugc

SEQ ID NO: 10576 - RNA, 22 nt, Unknown
  Description of Unknown: Target viral genome RNA sequence
ucuugcuuucgugguauucuug

SEQ ID NO: 10577 - RNA, 22 nt, Unknown
  Description of Unknown: Target viral genome RNA sequence
uucuugcuuucgugguauucuu

SEQ ID NO: 10578 - RNA, 22 nt, Unknown
  Description of Unknown: Target viral genome RNA sequence
ucgugguauucuugcuaguuac

SEQ ID NO: 10579 - RNA, 22 nt, Unknown
  Description of Unknown: Target viral genome RNA sequence
uucgugguauucuugcuaguua

SEQ ID NO: 10580 - RNA, 22 nt, Unknown
  Description of Unknown: Target viral genome RNA sequence
gaguguguacuuggacaaucaa

SEQ ID NO: 10581 - RNA, 22 nt, Unknown
  Description of Unknown: Target viral genome RNA sequence
ugcuaaucuugcugcuacuaaa

SEQ ID NO: 10582 - RNA, 22 nt, Unknown
  Description of Unknown: Target viral genome RNA sequence
cuacaacuuccucaaggaacaa

SEQ ID NO: 10583 - RNA, 22 nt, Unknown
  Description of Unknown: Target viral genome RNA sequence
uacaacuuccucaaggaacaac

SEQ ID NO: 10584 - RNA, 22 nt, Unknown
  Description of Unknown: Target viral genome RNA sequence
cgugcuacaacuuccucaagga

SEQ ID NO: 10585 - RNA, 22 nt, Unknown
  Description of Unknown: Target viral genome RNA sequence
gugcuacaacuuccucaaggaa

SEQ ID NO: 10586 - RNA, 22 nt, Unknown
  Description of Unknown: Target viral genome RNA sequence
ugcuacaacuuccucaaggaac

SEQ ID NO: 10587 - RNA, 22 nt, Unknown
  Description of Unknown: Target viral genome RNA sequence
gcuacaacuuccucaaggaaca

SEQ ID NO: 10588 - RNA, 22 nt, Unknown
  Description of Unknown: Target viral genome RNA sequence
aucgugcuacaacuuccucaag

SEQ ID NO: 10589 - RNA, 22 nt, Unknown
  Description of Unknown: Target viral genome RNA sequence
ucgugcuacaacuuccucaagg

SEQ ID NO: 10590 - RNA, 22 nt, Unknown
  Description of Unknown: Target viral genome RNA sequence
ggcaucauauggguugcaacug

SEQ ID NO: 10591 - RNA, 22 nt, Unknown
  Description of Unknown: Target viral genome RNA sequence
gcaucauauggguugcaacuga

SEQ ID NO: 10592 - RNA, 22 nt, Unknown
  Description of Unknown: Target viral genome RNA sequence
caucauauggguugcaacugag

SEQ ID NO: 10593 - RNA, 22 nt, Unknown
  Description of Unknown: Target viral genome RNA sequence
auccuaaaggauuuugugacuu

SEQ ID NO: 10594 - RNA, 22 nt, Unknown
  Description of Unknown: Target viral genome RNA sequence
uccuuaaugguucaugugguag

SEQ ID NO: 10595 - RNA, 22 nt, Unknown
  Description of Unknown: Target viral genome RNA sequence
uuccuuaaugguucauguggua

SEQ ID NO: 10596 - RNA, 22 nt, Unknown
  Description of Unknown: Target viral genome RNA sequence
aaagguaagauggagagccuug

SEQ ID NO: 10597 - RNA, 22 nt, Unknown
  Description of Unknown: Target viral genome RNA sequence
aagguaagauggagagccuugu

SEQ ID NO: 10598 - RNA, 22 nt, Unknown
  Description of Unknown: Target viral genome RNA sequence
agguaagauggagagccuuguc

SEQ ID NO: 10599 - RNA, 22 nt, Unknown
  Description of Unknown: Target viral genome RNA sequence
gguaagauggagagccuugucc

SEQ ID NO: 10600 - RNA, 22 nt, Unknown
  Description of Unknown: Target viral genome RNA sequence
accgaaagguaagauggagagc

SEQ ID NO: 10601 - RNA, 22 nt, Unknown
  Description of Unknown: Target viral genome RNA sequence
ccgaaagguaagauggagagcc

SEQ ID NO: 10602 - RNA, 22 nt, Unknown
  Description of Unknown: Target viral genome RNA sequence
cgaaagguaagauggagagccu

SEQ ID NO: 10603 - RNA, 22 nt, Unknown
  Description of Unknown: Target viral genome RNA sequence
gaaagguaagauggagagccuu

SEQ ID NO: 10604 - RNA, 22 nt, Unknown
  Description of Unknown: Target viral genome RNA sequence
aaauacuugucacauacaauug

SEQ ID NO: 10605 - RNA, 22 nt, Unknown
  Description of Unknown: Target viral genome RNA sequence
agaaauacuugucacauacaau

SEQ ID NO: 10606 - RNA, 22 nt, Unknown
  Description of Unknown: Target viral genome RNA sequence
gaaauacuugucacauacaauu

SEQ ID NO: 10607 - RNA, 22 nt, Unknown
  Description of Unknown: Target viral genome RNA sequence
aagaaauacuugucacauacaa

SEQ ID NO: 10608 - RNA, 22 nt, Unknown
  Description of Unknown: Target viral genome RNA sequence
auuaugacuacuaucguuauaa

SEQ ID NO: 10609 - RNA, 22 nt, Unknown
  Description of Unknown: Target viral genome RNA sequence
uuaugacuacuaucguuauaau

SEQ ID NO: 10610 - RNA, 22 nt, Unknown
  Description of Unknown: Target viral genome RNA sequence
uaugacuacuaucguuauaauc

SEQ ID NO: 10611 - RNA, 22 nt, Unknown
  Description of Unknown: Target viral genome RNA sequence
augacuacuaucguuauaaucu

SEQ ID NO: 10612 - RNA, 22 nt, Unknown
  Description of Unknown: Target viral genome RNA sequence
gauuaugacuacuaucguuaua

SEQ ID NO: 10613 - RNA, 22 nt, Unknown
  Description of Unknown: Target viral genome RNA sequence
cacauguagcuaguugugaugc

SEQ ID NO: 10614 - RNA, 22 nt, Unknown
  Description of Unknown: Target viral genome RNA sequence
ugcacauguagcuaguugugau

SEQ ID NO: 10615 - RNA, 22 nt, Unknown
  Description of Unknown: Target viral genome RNA sequence
gcacauguagcuaguugugaug

SEQ ID NO: 10616 - RNA, 22 nt, Unknown
  Description of Unknown: Target viral genome RNA sequence
aaugcacauguagcuaguugug

SEQ ID NO: 10617 - RNA, 22 nt, Unknown
  Description of Unknown: Target viral genome RNA sequence
augcacauguagcuaguuguga

SEQ ID NO: 10618 - RNA, 22 nt, Unknown
  Description of Unknown: Target viral genome RNA sequence
ugaucuucuggucuaaacgaac

SEQ ID NO: 10619 - RNA, 22 nt, Unknown
  Description of Unknown: Target viral genome RNA sequence
cuucuggucuaaacgaacuaaa

SEQ ID NO: 10620 - RNA, 22 nt, Unknown
  Description of Unknown: Target viral genome RNA sequence
ucuucuggucuaaacgaacuaa

SEQ ID NO: 10621 - RNA, 22 nt, Unknown
  Description of Unknown: Target viral genome RNA sequence
aucuucuggucuaaacgaacua

SEQ ID NO: 10622 - RNA, 22 nt, Unknown
  Description of Unknown: Target viral genome RNA sequence
gaucuucuggucuaaacgaacu

SEQ ID NO: 10623 - RNA, 22 nt, Unknown
  Description of Unknown: Target viral genome RNA sequence
ucuggucuaaacgaacuaaaua

SEQ ID NO: 10624 - RNA, 22 nt, Unknown
  Description of Unknown: Target viral genome RNA sequence
uucuggucuaaacgaacuaaau

SEQ ID NO: 10625 - RNA, 22 nt, Unknown
  Description of Unknown: Target viral genome RNA sequence
auacugugaucugggacuacaa

SEQ ID NO: 10626 - RNA, 22 nt, Unknown
  Description of Unknown: Target viral genome RNA sequence
aauacugugaucugggacuaca

SEQ ID NO: 10627 - RNA, 22 nt, Unknown
  Description of Unknown: Target viral genome RNA sequence
cuuucuuauuacaaauugggag

SEQ ID NO: 10628 - RNA, 22 nt, Unknown
  Description of Unknown: Target viral genome RNA sequence
uuucuuauuacaaauugggagc

SEQ ID NO: 10629 - RNA, 22 nt, Unknown
  Description of Unknown: Target viral genome RNA sequence
cgcuuucuuauuacaaauuggg

SEQ ID NO: 10630 - RNA, 22 nt, Unknown
  Description of Unknown: Target viral genome RNA sequence
gcuuucuuauuacaaauuggga

SEQ ID NO: 10631 - RNA, 22 nt, Unknown
  Description of Unknown: Target viral genome RNA sequence
aaaggauuaaacaaccuaaaua

SEQ ID NO: 10632 - RNA, 22 nt, Unknown
  Description of Unknown: Target viral genome RNA sequence
aaggauuaaacaaccuaaauag

SEQ ID NO: 10633 - RNA, 22 nt, Unknown
  Description of Unknown: Target viral genome RNA sequence
aggauuaaacaaccuaaauaga

SEQ ID NO: 10634 - RNA, 22 nt, Unknown
  Description of Unknown: Target viral genome RNA sequence
ggauuaaacaaccuaaauagag

SEQ ID NO: 10635 - RNA, 22 nt, Unknown
  Description of Unknown: Target viral genome RNA sequence
gauuaaacaaccuaaauagagg

SEQ ID NO: 10636 - RNA, 22 nt, Unknown
  Description of Unknown: Target viral genome RNA sequence
auuaaacaaccuaaauagaggu

SEQ ID NO: 10637 - RNA, 22 nt, Unknown
  Description of Unknown: Target viral genome RNA sequence
uuuuggcaucuuuuucugcuuc

SEQ ID NO: 10638 - RNA, 22 nt, Unknown
  Description of Unknown: Target viral genome RNA sequence
ugauguucuuuaccaaccacca

SEQ ID NO: 10639 - RNA, 22 nt, Unknown
  Description of Unknown: Target viral genome RNA sequence
gauguucuuuaccaaccaccac

SEQ ID NO: 10640 - RNA, 22 nt, Unknown
  Description of Unknown: Target viral genome RNA sequence
uacguugucuuuggagcacaaa

SEQ ID NO: 10641 - RNA, 22 nt, Unknown
  Description of Unknown: Target viral genome RNA sequence
ugguguauacguugucuuugga

SEQ ID NO: 10642 - RNA, 22 nt, Unknown
  Description of Unknown: Target viral genome RNA sequence
gguguauacguugucuuuggag

SEQ ID NO: 10643 - RNA, 22 nt, Unknown
  Description of Unknown: Target viral genome RNA sequence
aagaaucauacaucaccagaug

SEQ ID NO: 10644 - RNA, 22 nt, Unknown
  Description of Unknown: Target viral genome RNA sequence
cugaucuucuggucuaaacgaa

SEQ ID NO: 10645 - RNA, 22 nt, Unknown
  Description of Unknown: Target viral genome RNA sequence
ccugaucuucuggucuaaacga

SEQ ID NO: 10646 - RNA, 22 nt, Unknown
  Description of Unknown: Target viral genome RNA sequence
uccugaucuucuggucuaaacg

SEQ ID NO: 10647 - RNA, 22 nt, Unknown
  Description of Unknown: Target viral genome RNA sequence
gcacuaguacugaugucguaua

SEQ ID NO: 10648 - RNA, 22 nt, Unknown
  Description of Unknown: Target viral genome RNA sequence
ggcacuaguacugaugucguau

SEQ ID NO: 10649 - RNA, 22 nt, Unknown
  Description of Unknown: Target viral genome RNA sequence
aggcacuaguacugaugucgua

SEQ ID NO: 10650 - RNA, 22 nt, Unknown
  Description of Unknown: Target viral genome RNA sequence
caggcacuaguacugaugucgu

SEQ ID NO: 10651 - RNA, 22 nt, Unknown
  Description of Unknown: Target viral genome RNA sequence
acaggcacuaguacugaugucg

SEQ ID NO: 10652 - RNA, 22 nt, Unknown
  Description of Unknown: Target viral genome RNA sequence
cacaggcacuaguacugauguc

SEQ ID NO: 10653 - RNA, 22 nt, Unknown
  Description of Unknown: Target viral genome RNA sequence
gcacaggcacuaguacugaugu

SEQ ID NO: 10654 - RNA, 22 nt, Unknown
  Description of Unknown: Target viral genome RNA sequence
ggcacaggcacuaguacugaug

SEQ ID NO: 10655 - RNA, 22 nt, Unknown
  Description of Unknown: Target viral genome RNA sequence
acuaguacugaugucguauaca

SEQ ID NO: 10656 - RNA, 22 nt, Unknown
  Description of Unknown: Target viral genome RNA sequence
cacuaguacugaugucguauac

SEQ ID NO: 10657 - RNA, 22 nt, Unknown
  Description of Unknown: Target viral genome RNA sequence
gggcuaagcgcaacauuaaacc

SEQ ID NO: 10658 - RNA, 22 nt, Unknown
  Description of Unknown: Target viral genome RNA sequence
ggcuaagcgcaacauuaaacca

SEQ ID NO: 10659 - RNA, 22 nt, Unknown
  Description of Unknown: Target viral genome RNA sequence
ugagcuuugggcuaagcgcaac

SEQ ID NO: 10660 - RNA, 22 nt, Unknown
  Description of Unknown: Target viral genome RNA sequence
gagcuuugggcuaagcgcaaca

SEQ ID NO: 10661 - RNA, 22 nt, Unknown
  Description of Unknown: Target viral genome RNA sequence
agcuuugggcuaagcgcaacau

SEQ ID NO: 10662 - RNA, 22 nt, Unknown
  Description of Unknown: Target viral genome RNA sequence
gcuuugggcuaagcgcaacauu

SEQ ID NO: 10663 - RNA, 22 nt, Unknown
  Description of Unknown: Target viral genome RNA sequence
cuuugggcuaagcgcaacauua

SEQ ID NO: 10664 - RNA, 22 nt, Unknown
  Description of Unknown: Target viral genome RNA sequence
uuugggcuaagcgcaacauuaa

SEQ ID NO: 10665 - RNA, 22 nt, Unknown
  Description of Unknown: Target viral genome RNA sequence
uugggcuaagcgcaacauuaaa

SEQ ID NO: 10666 - RNA, 22 nt, Unknown
  Description of Unknown: Target viral genome RNA sequence
ugggcuaagcgcaacauuaaac

SEQ ID NO: 10667 - RNA, 22 nt, Unknown
  Description of Unknown: Target viral genome RNA sequence
uacuguaguaauuggaacaagc

SEQ ID NO: 10668 - RNA, 22 nt, Unknown
  Description of Unknown: Target viral genome RNA sequence
cuacuguaguaauuggaacaag

SEQ ID NO: 10669 - RNA, 22 nt, Unknown
  Description of Unknown: Target viral genome RNA sequence
cuguaguaauuggaacaagcaa

SEQ ID NO: 10670 - RNA, 22 nt, Unknown
  Description of Unknown: Target viral genome RNA sequence
acuguaguaauuggaacaagca

SEQ ID NO: 10671 - RNA, 22 nt, Unknown
  Description of Unknown: Target viral genome RNA sequence
gagcuacuguaguaauuggaac

SEQ ID NO: 10672 - RNA, 22 nt, Unknown
  Description of Unknown: Target viral genome RNA sequence
ggagcuacuguaguaauuggaa

SEQ ID NO: 10673 - RNA, 22 nt, Unknown
  Description of Unknown: Target viral genome RNA sequence
gcuacuguaguaauuggaacaa

SEQ ID NO: 10674 - RNA, 22 nt, Unknown
  Description of Unknown: Target viral genome RNA sequence
agcuacuguaguaauuggaaca

SEQ ID NO: 10675 - RNA, 22 nt, Unknown
  Description of Unknown: Target viral genome RNA sequence
uacacuccagggaccaccuggu

SEQ ID NO: 10676 - RNA, 22 nt, Unknown
  Description of Unknown: Target viral genome RNA sequence
ucuacacuccagggaccaccug

SEQ ID NO: 10677 - RNA, 22 nt, Unknown
  Description of Unknown: Target viral genome RNA sequence
uagcgugccuuuguaagcacaa

SEQ ID NO: 10678 - RNA, 22 nt, Unknown
  Description of Unknown: Target viral genome RNA sequence
agcgugccuuuguaagcacaag

SEQ ID NO: 10679 - RNA, 22 nt, Unknown
  Description of Unknown: Target viral genome RNA sequence
acuagcgugccuuuguaagcac

SEQ ID NO: 10680 - RNA, 22 nt, Unknown
  Description of Unknown: Target viral genome RNA sequence
cuagcgugccuuuguaagcaca

SEQ ID NO: 10681 - RNA, 22 nt, Unknown
  Description of Unknown: Target viral genome RNA sequence
gcgugccuuuguaagcacaagc

SEQ ID NO: 10682 - RNA, 22 nt, Unknown
  Description of Unknown: Target viral genome RNA sequence
agaugggcuauauaaacguuuu

SEQ ID NO: 10683 - RNA, 22 nt, Unknown
  Description of Unknown: Target viral genome RNA sequence
cagaugggcuauauaaacguuu

SEQ ID NO: 10684 - RNA, 22 nt, Unknown
  Description of Unknown: Target viral genome RNA sequence
caaggcagaugggcuauauaaa

SEQ ID NO: 10685 - RNA, 22 nt, Unknown
  Description of Unknown: Target viral genome RNA sequence
acaaggcagaugggcuauauaa

SEQ ID NO: 10686 - RNA, 22 nt, Unknown
  Description of Unknown: Target viral genome RNA sequence
cacaaggcagaugggcuauaua

SEQ ID NO: 10687 - RNA, 22 nt, Unknown
  Description of Unknown: Target viral genome RNA sequence
acacaaggcagaugggcuauau

SEQ ID NO: 10688 - RNA, 22 nt, Unknown
  Description of Unknown: Target viral genome RNA sequence
gcagaugggcuauauaaacguu

SEQ ID NO: 10689 - RNA, 22 nt, Unknown
  Description of Unknown: Target viral genome RNA sequence
ggcagaugggcuauauaaacgu

SEQ ID NO: 10690 - RNA, 22 nt, Unknown
  Description of Unknown: Target viral genome RNA sequence
aggcagaugggcuauauaaacg

SEQ ID NO: 10691 - RNA, 22 nt, Unknown
  Description of Unknown: Target viral genome RNA sequence
aaggcagaugggcuauauaaac

SEQ ID NO: 10692 - RNA, 22 nt, Unknown
  Description of Unknown: Target viral genome RNA sequence
cuuuuguuaugaugucagcacc

SEQ ID NO: 10693 - RNA, 22 nt, Unknown
  Description of Unknown: Target viral genome RNA sequence
uuuguuaugaugucagcaccac

SEQ ID NO: 10694 - RNA, 22 nt, Unknown
  Description of Unknown: Target viral genome RNA sequence
uuuuguuaugaugucagcacca

SEQ ID NO: 10695 - RNA, 22 nt, Unknown
  Description of Unknown: Target viral genome RNA sequence
guaaugucaucccuacuauaac

SEQ ID NO: 10696 - RNA, 22 nt, Unknown
  Description of Unknown: Target viral genome RNA sequence
uaaugucaucccuacuauaacu

SEQ ID NO: 10697 - RNA, 22 nt, Unknown
  Description of Unknown: Target viral genome RNA sequence
aagaugcacuuuucgcauauac

SEQ ID NO: 10698 - RNA, 22 nt, Unknown
  Description of Unknown: Target viral genome RNA sequence
aaacguaaugucaucccuacua

SEQ ID NO: 10699 - RNA, 22 nt, Unknown
  Description of Unknown: Target viral genome RNA sequence
aacguaaugucaucccuacuau

SEQ ID NO: 10700 - RNA, 22 nt, Unknown
  Description of Unknown: Target viral genome RNA sequence
acguaaugucaucccuacuaua

SEQ ID NO: 10701 - RNA, 22 nt, Unknown
  Description of Unknown: Target viral genome RNA sequence
cguaaugucaucccuacuauaa

SEQ ID NO: 10702 - RNA, 22 nt, Unknown
  Description of Unknown: Target viral genome RNA sequence
caauaauacugcgucuugguuc

SEQ ID NO: 10703 - RNA, 22 nt, Unknown
  Description of Unknown: Target viral genome RNA sequence
ccaauaauacugcgucuugguu

SEQ ID NO: 10704 - RNA, 22 nt, Unknown
  Description of Unknown: Target viral genome RNA sequence
cagacauguuccucggaacuug

SEQ ID NO: 10705 - RNA, 22 nt, Unknown
  Description of Unknown: Target viral genome RNA sequence
auucagaucuuaaugacuuugu

SEQ ID NO: 10706 - RNA, 22 nt, Unknown
  Description of Unknown: Target viral genome RNA sequence
ugcuugucgauucagaucuuaa

SEQ ID NO: 10707 - RNA, 22 nt, Unknown
  Description of Unknown: Target viral genome RNA sequence
cgauucagaucuuaaugacuuu

SEQ ID NO: 10708 - RNA, 22 nt, Unknown
  Description of Unknown: Target viral genome RNA sequence
acgauauauagucuacucuugu

SEQ ID NO: 10709 - RNA, 22 nt, Unknown
  Description of Unknown: Target viral genome RNA sequence
uuuacuuguacuugacauuuua

SEQ ID NO: 10710 - RNA, 22 nt, Unknown
  Description of Unknown: Target viral genome RNA sequence
uuacuuguacuugacauuuuau

SEQ ID NO: 10711 - RNA, 22 nt, Unknown
  Description of Unknown: Target viral genome RNA sequence
ucagaauaugacuaugucauau

SEQ ID NO: 10712 - RNA, 22 nt, Unknown
  Description of Unknown: Target viral genome RNA sequence
agaauaugacuaugucauauuc

SEQ ID NO: 10713 - RNA, 22 nt, Unknown
  Description of Unknown: Target viral genome RNA sequence
cagaauaugacuaugucauauu

SEQ ID NO: 10714 - RNA, 22 nt, Unknown
  Description of Unknown: Target viral genome RNA sequence
auguugcuuuucaaacugucaa

SEQ ID NO: 10715 - RNA, 22 nt, Unknown
  Description of Unknown: Target viral genome RNA sequence
aauguugcuuuucaaacuguca

SEQ ID NO: 10716 - RNA, 22 nt, Unknown
  Description of Unknown: Target viral genome RNA sequence
aacaauguugcuuuucaaacug

SEQ ID NO: 10717 - RNA, 22 nt, Unknown
  Description of Unknown: Target viral genome RNA sequence
uaacaauguugcuuuucaaacu

SEQ ID NO: 10718 - RNA, 22 nt, Unknown
  Description of Unknown: Target viral genome RNA sequence
caauguugcuuuucaaacuguc

SEQ ID NO: 10719 - RNA, 22 nt, Unknown
  Description of Unknown: Target viral genome RNA sequence
acaauguugcuuuucaaacugu

SEQ ID NO: 10720 - RNA, 22 nt, Unknown
  Description of Unknown: Target viral genome RNA sequence
cuaacaauguugcuuuucaaac

SEQ ID NO: 10721 - RNA, 22 nt, Unknown
  Description of Unknown: Target viral genome RNA sequence
acuaacaauguugcuuuucaaa

SEQ ID NO: 10722 - RNA, 22 nt, Unknown
  Description of Unknown: Target viral genome RNA sequence
agguuacuauagcagagauauu

SEQ ID NO: 10723 - RNA, 22 nt, Unknown
  Description of Unknown: Target viral genome RNA sequence
cagguuacuauagcagagauau

SEQ ID NO: 10724 - RNA, 22 nt, Unknown
  Description of Unknown: Target viral genome RNA sequence
agauuuccuaauauuacaaacu

SEQ ID NO: 10725 - RNA, 22 nt, Unknown
  Description of Unknown: Target viral genome RNA sequence
gcaacgauaccgauacaagccu

SEQ ID NO: 10726 - RNA, 22 nt, Unknown
  Description of Unknown: Target viral genome RNA sequence
caacgauaccgauacaagccuc

SEQ ID NO: 10727 - RNA, 22 nt, Unknown
  Description of Unknown: Target viral genome RNA sequence
cuccaauuuuggugcaauuuca

SEQ ID NO: 10728 - RNA, 22 nt, Unknown
  Description of Unknown: Target viral genome RNA sequence
cuuagcuccaauuuuggugcaa

SEQ ID NO: 10729 - RNA, 22 nt, Unknown
  Description of Unknown: Target viral genome RNA sequence
acuuagcuccaauuuuggugca

SEQ ID NO: 10730 - RNA, 22 nt, Unknown
  Description of Unknown: Target viral genome RNA sequence
aacuuagcuccaauuuuggugc

SEQ ID NO: 10731 - RNA, 22 nt, Unknown
  Description of Unknown: Target viral genome RNA sequence
caacuuagcuccaauuuuggug

SEQ ID NO: 10732 - RNA, 22 nt, Unknown
  Description of Unknown: Target viral genome RNA sequence
gcuccaauuuuggugcaauuuc

SEQ ID NO: 10733 - RNA, 22 nt, Unknown
  Description of Unknown: Target viral genome RNA sequence
agcuccaauuuuggugcaauuu

SEQ ID NO: 10734 - RNA, 22 nt, Unknown
  Description of Unknown: Target viral genome RNA sequence
uagcuccaauuuuggugcaauu

SEQ ID NO: 10735 - RNA, 22 nt, Unknown
  Description of Unknown: Target viral genome RNA sequence
uuagcuccaauuuuggugcaau

SEQ ID NO: 10736 - RNA, 22 nt, Unknown
  Description of Unknown: Target viral genome RNA sequence
uaaccuuguggcuaugaaguac

SEQ ID NO: 10737 - RNA, 22 nt, Unknown
  Description of Unknown: Target viral genome RNA sequence
aaccuuguggcuaugaaguaca

SEQ ID NO: 10738 - RNA, 22 nt, Unknown
  Description of Unknown: Target viral genome RNA sequence
accuuguggcuaugaaguacaa

SEQ ID NO: 10739 - RNA, 22 nt, Unknown
  Description of Unknown: Target viral genome RNA sequence
auuaauugacuucuauuugugc

SEQ ID NO: 10740 - RNA, 22 nt, Unknown
  Description of Unknown: Target viral genome RNA sequence
cauuaauugacuucuauuugug

SEQ ID NO: 10741 - RNA, 22 nt, Unknown
  Description of Unknown: Target viral genome RNA sequence
uguacugaaagacucaagcuuu

SEQ ID NO: 10742 - RNA, 22 nt, Unknown
  Description of Unknown: Target viral genome RNA sequence
guacugaaagacucaagcuuuu

SEQ ID NO: 10743 - RNA, 22 nt, Unknown
  Description of Unknown: Target viral genome RNA sequence
agguuuuucuacagguguuaac

SEQ ID NO: 10744 - RNA, 22 nt, Unknown
  Description of Unknown: Target viral genome RNA sequence
uuucuacagguguuaaccuagu

SEQ ID NO: 10745 - RNA, 22 nt, Unknown
  Description of Unknown: Target viral genome RNA sequence
uuuucuacagguguuaaccuag

SEQ ID NO: 10746 - RNA, 22 nt, Unknown
  Description of Unknown: Target viral genome RNA sequence
accuuguagguuuguuacagac

SEQ ID NO: 10747 - RNA, 22 nt, Unknown
  Description of Unknown: Target viral genome RNA sequence
caccuuguagguuuguuacaga

SEQ ID NO: 10748 - RNA, 22 nt, Unknown
  Description of Unknown: Target viral genome RNA sequence
ccaccuuguagguuuguuacag

SEQ ID NO: 10749 - RNA, 22 nt, Unknown
  Description of Unknown: Target viral genome RNA sequence
accaccuuguagguuuguuaca

SEQ ID NO: 10750 - RNA, 22 nt, Unknown
  Description of Unknown: Target viral genome RNA sequence
uguagguuuguuacagacacac

SEQ ID NO: 10751 - RNA, 22 nt, Unknown
  Description of Unknown: Target viral genome RNA sequence
uuguagguuuguuacagacaca

SEQ ID NO: 10752 - RNA, 22 nt, Unknown
  Description of Unknown: Target viral genome RNA sequence
cuuguagguuuguuacagacac

SEQ ID NO: 10753 - RNA, 22 nt, Unknown
  Description of Unknown: Target viral genome RNA sequence
ccuuguagguuuguuacagaca

SEQ ID NO: 10754 - RNA, 22 nt, Unknown
  Description of Unknown: Target viral genome RNA sequence
uagguuuguuacagacacaccu

SEQ ID NO: 10755 - RNA, 22 nt, Unknown
  Description of Unknown: Target viral genome RNA sequence
guagguuuguuacagacacacc

SEQ ID NO: 10756 - RNA, 22 nt, Unknown
  Description of Unknown: Target viral genome RNA sequence
agccuuguagugacaaagcuua

SEQ ID NO: 10757 - RNA, 22 nt, Unknown
  Description of Unknown: Target viral genome RNA sequence
cagccuuguagugacaaagcuu

SEQ ID NO: 10758 - RNA, 22 nt, Unknown
  Description of Unknown: Target viral genome RNA sequence
guuauuggacauucuaugcaaa

SEQ ID NO: 10759 - RNA, 22 nt, Unknown
  Description of Unknown: Target viral genome RNA sequence
acugaccuuacuaaaggaccuc

SEQ ID NO: 10760 - RNA, 22 nt, Unknown
  Description of Unknown: Target viral genome RNA sequence
cugaccuuacuaaaggaccuca

SEQ ID NO: 10761 - RNA, 22 nt, Unknown
  Description of Unknown: Target viral genome RNA sequence
agacugaccuuacuaaaggacc

SEQ ID NO: 10762 - RNA, 22 nt, Unknown
  Description of Unknown: Target viral genome RNA sequence
gacugaccuuacuaaaggaccu

SEQ ID NO: 10763 - RNA, 22 nt, Unknown
  Description of Unknown: Target viral genome RNA sequence
accuuacuaaaggaccucauga

SEQ ID NO: 10764 - RNA, 22 nt, Unknown
  Description of Unknown: Target viral genome RNA sequence
ccuuacuaaaggaccucaugaa

SEQ ID NO: 10765 - RNA, 22 nt, Unknown
  Description of Unknown: Target viral genome RNA sequence
ugaccuuacuaaaggaccucau

SEQ ID NO: 10766 - RNA, 22 nt, Unknown
  Description of Unknown: Target viral genome RNA sequence
gaccuuacuaaaggaccucaug

SEQ ID NO: 10767 - RNA, 22 nt, Unknown
  Description of Unknown: Target viral genome RNA sequence
auaacagaugcgcaaacagguu

SEQ ID NO: 10768 - RNA, 22 nt, Unknown
  Description of Unknown: Target viral genome RNA sequence
uugaccgugaugcagccaugca

SEQ ID NO: 10769 - RNA, 22 nt, Unknown
  Description of Unknown: Target viral genome RNA sequence
uuugaccgugaugcagccaugc

SEQ ID NO: 10770 - RNA, 22 nt, Unknown
  Description of Unknown: Target viral genome RNA sequence
aaucugaauuugaccgugaugc

SEQ ID NO: 10771 - RNA, 22 nt, Unknown
  Description of Unknown: Target viral genome RNA sequence
aucaagccauuuccaugugggc

SEQ ID NO: 10772 - RNA, 22 nt, Unknown
  Description of Unknown: Target viral genome RNA sequence
gaucaagccauuuccauguggg

SEQ ID NO: 10773 - RNA, 22 nt, Unknown
  Description of Unknown: Target viral genome RNA sequence
agaucaagccauuuccaugugg

SEQ ID NO: 10774 - RNA, 22 nt, Unknown
  Description of Unknown: Target viral genome RNA sequence
uagaucaagccauuuccaugug

SEQ ID NO: 10775 - RNA, 22 nt, Unknown
  Description of Unknown: Target viral genome RNA sequence
uuagaucaagccauuuccaugu

SEQ ID NO: 10776 - RNA, 22 nt, Unknown
  Description of Unknown: Target viral genome RNA sequence
uuuagaucaagccauuuccaug

SEQ ID NO: 10777 - RNA, 22 nt, Unknown
  Description of Unknown: Target viral genome RNA sequence
cuuuagaucaagccauuuccau

SEQ ID NO: 10778 - RNA, 22 nt, Unknown
  Description of Unknown: Target viral genome RNA sequence
gcuggugaagcugcuaacuuuu

SEQ ID NO: 10779 - RNA, 22 nt, Unknown
  Description of Unknown: Target viral genome RNA sequence
uucgaucucuuguagaucuguu

SEQ ID NO: 10780 - RNA, 22 nt, Unknown
  Description of Unknown: Target viral genome RNA sequence
cguguagaguguuuugauaaau

SEQ ID NO: 10781 - RNA, 22 nt, Unknown
  Description of Unknown: Target viral genome RNA sequence
uguagaguguuuugauaaauuc

SEQ ID NO: 10782 - RNA, 22 nt, Unknown
  Description of Unknown: Target viral genome RNA sequence
guguagaguguuuugauaaauu

SEQ ID NO: 10783 - RNA, 22 nt, Unknown
  Description of Unknown: Target viral genome RNA sequence
uagaguguuuugauaaauucaa

SEQ ID NO: 10784 - RNA, 22 nt, Unknown
  Description of Unknown: Target viral genome RNA sequence
guagaguguuuugauaaauuca

SEQ ID NO: 10785 - RNA, 22 nt, Unknown
  Description of Unknown: Target viral genome RNA sequence
gaguguuuugauaaauucaaag

SEQ ID NO: 10786 - RNA, 22 nt, Unknown
  Description of Unknown: Target viral genome RNA sequence
agaguguuuugauaaauucaaa

SEQ ID NO: 10787 - RNA, 22 nt, Unknown
  Description of Unknown: Target viral genome RNA sequence
guguuuugauaaauucaaagug

SEQ ID NO: 10788 - RNA, 22 nt, Unknown
  Description of Unknown: Target viral genome RNA sequence
aguguuuugauaaauucaaagu

SEQ ID NO: 10789 - RNA, 22 nt, Unknown
  Description of Unknown: Target viral genome RNA sequence
gauucuuacuuuguaguuaaga

SEQ ID NO: 10790 - RNA, 22 nt, Unknown
  Description of Unknown: Target viral genome RNA sequence
auucuuacuuuguaguuaagag

SEQ ID NO: 10791 - RNA, 22 nt, Unknown
  Description of Unknown: Target viral genome RNA sequence
cuuacuuuguaguuaagagaca

SEQ ID NO: 10792 - RNA, 22 nt, Unknown
  Description of Unknown: Target viral genome RNA sequence
ucuuacuuuguaguuaagagac

SEQ ID NO: 10793 - RNA, 22 nt, Unknown
  Description of Unknown: Target viral genome RNA sequence
uuaacuuuaaucucacauagca

SEQ ID NO: 10794 - RNA, 22 nt, Unknown
  Description of Unknown: Target viral genome RNA sequence
uaacuuuaaucucacauagcaa

SEQ ID NO: 10795 - RNA, 22 nt, Unknown
  Description of Unknown: Target viral genome RNA sequence
aguuaacuuuaaucucacauag

SEQ ID NO: 10796 - RNA, 22 nt, Unknown
  Description of Unknown: Target viral genome RNA sequence
guuaacuuuaaucucacauagc

SEQ ID NO: 10797 - RNA, 22 nt, Unknown
  Description of Unknown: Target viral genome RNA sequence
guaguuaacuuuaaucucacau

SEQ ID NO: 10798 - RNA, 22 nt, Unknown
  Description of Unknown: Target viral genome RNA sequence
uaguuaacuuuaaucucacaua

SEQ ID NO: 10799 - RNA, 22 nt, Unknown
  Description of Unknown: Target viral genome RNA sequence
uguaguuaacuuuaaucucaca

SEQ ID NO: 10800 - RNA, 22 nt, Unknown
  Description of Unknown: Target viral genome RNA sequence
ggugguuuuaauuuuucacaaa

SEQ ID NO: 10801 - RNA, 22 nt, Unknown
  Description of Unknown: Target viral genome RNA sequence
ucuucuuugcucaggaugguaa

SEQ ID NO: 10802 - RNA, 22 nt, Unknown
  Description of Unknown: Target viral genome RNA sequence
aaacacuucuucuuugcucagg

SEQ ID NO: 10803 - RNA, 22 nt, Unknown
  Description of Unknown: Target viral genome RNA sequence
aaggaaguucuguugaauuaaa

SEQ ID NO: 10804 - RNA, 22 nt, Unknown
  Description of Unknown: Target viral genome RNA sequence
acacuucuucuuugcucaggau

SEQ ID NO: 10805 - RNA, 22 nt, Unknown
  Description of Unknown: Target viral genome RNA sequence
aacacuucuucuuugcucagga

SEQ ID NO: 10806 - RNA, 22 nt, Unknown
  Description of Unknown: Target viral genome RNA sequence
acuucuucuuugcucaggaugg

SEQ ID NO: 10807 - RNA, 22 nt, Unknown
  Description of Unknown: Target viral genome RNA sequence
cacuucuucuuugcucaggaug

SEQ ID NO: 10808 - RNA, 22 nt, Unknown
  Description of Unknown: Target viral genome RNA sequence
uucuucuuugcucaggauggua

SEQ ID NO: 10809 - RNA, 22 nt, Unknown
  Description of Unknown: Target viral genome RNA sequence
cuucuucuuugcucaggauggu

SEQ ID NO: 10810 - RNA, 22 nt, Unknown
  Description of Unknown: Target viral genome RNA sequence
cgauacaagccucacucccuuu

SEQ ID NO: 10811 - RNA, 22 nt, Unknown
  Description of Unknown: Target viral genome RNA sequence
accgauacaagccucacucccu

SEQ ID NO: 10812 - RNA, 22 nt, Unknown
  Description of Unknown: Target viral genome RNA sequence
augcagggugcuguagacauaa

SEQ ID NO: 10813 - RNA, 22 nt, Unknown
  Description of Unknown: Target viral genome RNA sequence
ugcagggugcuguagacauaaa

SEQ ID NO: 10814 - RNA, 22 nt, Unknown
  Description of Unknown: Target viral genome RNA sequence
cugguaugauuucggugauuuc

SEQ ID NO: 10815 - RNA, 22 nt, Unknown
  Description of Unknown: Target viral genome RNA sequence
acugguaugauuucggugauuu

SEQ ID NO: 10816 - RNA, 22 nt, Unknown
  Description of Unknown: Target viral genome RNA sequence
uauguuaaaccagguggaaccu

SEQ ID NO: 10817 - RNA, 22 nt, Unknown
  Description of Unknown: Target viral genome RNA sequence
auauguuaaaccagguggaacc

SEQ ID NO: 10818 - RNA, 22 nt, Unknown
  Description of Unknown: Target viral genome RNA sequence
ucacuauauguuaaaccaggug

SEQ ID NO: 10819 - RNA, 22 nt, Unknown
  Description of Unknown: Target viral genome RNA sequence
uucacuauauguuaaaccaggu

SEQ ID NO: 10820 - RNA, 22 nt, Unknown
  Description of Unknown: Target viral genome RNA sequence
guucacuauauguuaaaccagg

SEQ ID NO: 10821 - RNA, 22 nt, Unknown
  Description of Unknown: Target viral genome RNA sequence
gguucacuauauguuaaaccag

SEQ ID NO: 10822 - RNA, 22 nt, Unknown
  Description of Unknown: Target viral genome RNA sequence
uauauguuaaaccagguggaac

SEQ ID NO: 10823 - RNA, 22 nt, Unknown
  Description of Unknown: Target viral genome RNA sequence
cuauauguuaaaccagguggaa

SEQ ID NO: 10824 - RNA, 22 nt, Unknown
  Description of Unknown: Target viral genome RNA sequence
acuauauguuaaaccaggugga

SEQ ID NO: 10825 - RNA, 22 nt, Unknown
  Description of Unknown: Target viral genome RNA sequence
cacuauauguuaaaccaggugg

SEQ ID NO: 10826 - RNA, 22 nt, Unknown
  Description of Unknown: Target viral genome RNA sequence
uugguggacccucagauucaac

SEQ ID NO: 10827 - RNA, 22 nt, Unknown
  Description of Unknown: Target viral genome RNA sequence
ugguggacccucagauucaacu

SEQ ID NO: 10828 - RNA, 22 nt, Unknown
  Description of Unknown: Target viral genome RNA sequence
gguggacccucagauucaacug

SEQ ID NO: 10829 - RNA, 22 nt, Unknown
  Description of Unknown: Target viral genome RNA sequence
uucaguugcuuacucuaauaac

SEQ ID NO: 10830 - RNA, 22 nt, Unknown
  Description of Unknown: Target viral genome RNA sequence
ggcuagaucugaggacaagagg

SEQ ID NO: 10831 - RNA, 22 nt, Unknown
  Description of Unknown: Target viral genome RNA sequence
aggcuagaucugaggacaagag

SEQ ID NO: 10832 - RNA, 22 nt, Unknown
  Description of Unknown: Target viral genome RNA sequence
caggcuagaucugaggacaaga

SEQ ID NO: 10833 - RNA, 22 nt, Unknown
  Description of Unknown: Target viral genome RNA sequence
acaggcuagaucugaggacaag

SEQ ID NO: 10834 - RNA, 22 nt, Unknown
  Description of Unknown: Target viral genome RNA sequence
agaucugaggacaagagggcaa

SEQ ID NO: 10835 - RNA, 22 nt, Unknown
  Description of Unknown: Target viral genome RNA sequence
uagaucugaggacaagagggca

SEQ ID NO: 10836 - RNA, 22 nt, Unknown
  Description of Unknown: Target viral genome RNA sequence
cuagaucugaggacaagagggc

SEQ ID NO: 10837 - RNA, 22 nt, Unknown
  Description of Unknown: Target viral genome RNA sequence
gcuagaucugaggacaagaggg

SEQ ID NO: 10838 - RNA, 22 nt, Unknown
  Description of Unknown: Target viral genome RNA sequence
gaucugaggacaagagggcaaa

SEQ ID NO: 10839 - RNA, 22 nt, Unknown
  Description of Unknown: Target viral genome RNA sequence
auaguuaauagcguacuucuuu

SEQ ID NO: 10840 - RNA, 22 nt, Unknown
  Description of Unknown: Target viral genome RNA sequence
uaguuaauagcguacuucuuuu

SEQ ID NO: 10841 - RNA, 22 nt, Unknown
  Description of Unknown: Target viral genome RNA sequence
uaauaguuaauagcguacuucu

SEQ ID NO: 10842 - RNA, 22 nt, Unknown
  Description of Unknown: Target viral genome RNA sequence
aauaguuaauagcguacuucuu

SEQ ID NO: 10843 - RNA, 22 nt, Unknown
  Description of Unknown: Target viral genome RNA sequence
guuaauaguuaauagcguacuu

SEQ ID NO: 10844 - RNA, 22 nt, Unknown
  Description of Unknown: Target viral genome RNA sequence
uuaauaguuaauagcguacuuc

SEQ ID NO: 10845 - RNA, 22 nt, Unknown
  Description of Unknown: Target viral genome RNA sequence
acguuaauaguuaauagcguac

SEQ ID NO: 10846 - RNA, 22 nt, Unknown
  Description of Unknown: Target viral genome RNA sequence
cguuaauaguuaauagcguacu

SEQ ID NO: 10847 - RNA, 22 nt, Unknown
  Description of Unknown: Target viral genome RNA sequence
guacguuaauaguuaauagcgu

SEQ ID NO: 10848 - RNA, 22 nt, Unknown
  Description of Unknown: Target viral genome RNA sequence
uacguuaauaguuaauagcgua

SEQ ID NO: 10849 - RNA, 22 nt, Unknown
  Description of Unknown: Target viral genome RNA sequence
auuuuggcaucuuuuucugcuu

SEQ ID NO: 10850 - RNA, 22 nt, Unknown
  Description of Unknown: Target viral genome RNA sequence
cggcagucaagccucuucucgu

SEQ ID NO: 10851 - RNA, 22 nt, Unknown
  Description of Unknown: Target viral genome RNA sequence
gcggcagucaagccucuucucg

SEQ ID NO: 10852 - RNA, 22 nt, Unknown
  Description of Unknown: Target viral genome RNA sequence
ggcggcagucaagccucuucuc

SEQ ID NO: 10853 - RNA, 22 nt, Unknown
  Description of Unknown: Target viral genome RNA sequence
aggcggcagucaagccucuucu

SEQ ID NO: 10854 - RNA, 22 nt, Unknown
  Description of Unknown: Target viral genome RNA sequence
agucaagccucuucucguuccu

SEQ ID NO: 10855 - RNA, 22 nt, Unknown
  Description of Unknown: Target viral genome RNA sequence
cagucaagccucuucucguucc

SEQ ID NO: 10856 - RNA, 22 nt, Unknown
  Description of Unknown: Target viral genome RNA sequence
gcagucaagccucuucucguuc

SEQ ID NO: 10857 - RNA, 22 nt, Unknown
  Description of Unknown: Target viral genome RNA sequence
ggcagucaagccucuucucguu

SEQ ID NO: 10858 - RNA, 22 nt, Unknown
  Description of Unknown: Target viral genome RNA sequence
ucaagccucuucucguuccuca

SEQ ID NO: 10859 - RNA, 22 nt, Unknown
  Description of Unknown: Target viral genome RNA sequence
gucaagccucuucucguuccuc

SEQ ID NO: 10860 - RNA, 22 nt, Unknown
  Description of Unknown: Target viral genome RNA sequence
cgugguccagaacaaacccaag

SEQ ID NO: 10861 - RNA, 22 nt, Unknown
  Description of Unknown: Target viral genome RNA sequence
acgugguccagaacaaacccaa

SEQ ID NO: 10862 - RNA, 22 nt, Unknown
  Description of Unknown: Target viral genome RNA sequence
ugguccagaacaaacccaagga

SEQ ID NO: 10863 - RNA, 22 nt, Unknown
  Description of Unknown: Target viral genome RNA sequence
gugguccagaacaaacccaagg

SEQ ID NO: 10864 - RNA, 22 nt, Unknown
  Description of Unknown: Target viral genome RNA sequence
cagacgugguccagaacaaacc

SEQ ID NO: 10865 - RNA, 22 nt, Unknown
  Description of Unknown: Target viral genome RNA sequence
gcagacgugguccagaacaaac

SEQ ID NO: 10866 - RNA, 22 nt, Unknown
  Description of Unknown: Target viral genome RNA sequence
gacgugguccagaacaaaccca

SEQ ID NO: 10867 - RNA, 22 nt, Unknown
  Description of Unknown: Target viral genome RNA sequence
agacgugguccagaacaaaccc

SEQ ID NO: 10868 - RNA, 22 nt, Unknown
  Description of Unknown: Target viral genome RNA sequence
guccagaacaaacccaaggaaa

SEQ ID NO: 10869 - RNA, 22 nt, Unknown
  Description of Unknown: Target viral genome RNA sequence
gguccagaacaaacccaaggaa

SEQ ID NO: 10870 - RNA, 22 nt, Unknown
  Description of Unknown: Target viral genome RNA sequence
aguuuucuggguagguacaugu

SEQ ID NO: 10871 - RNA, 22 nt, Unknown
  Description of Unknown: Target viral genome RNA sequence
guuuucuggguagguacauguc

SEQ ID NO: 10872 - RNA, 22 nt, Unknown
  Description of Unknown: Target viral genome RNA sequence
aguuuuaugaggcuauguacac

SEQ ID NO: 10873 - RNA, 22 nt, Unknown
  Description of Unknown: Target viral genome RNA sequence
gaguuuuaugaggcuauguaca

SEQ ID NO: 10874 - RNA, 22 nt, Unknown
  Description of Unknown: Target viral genome RNA sequence
uuuuaugaggcuauguacacac

SEQ ID NO: 10875 - RNA, 22 nt, Unknown
  Description of Unknown: Target viral genome RNA sequence
guuuuaugaggcuauguacaca

SEQ ID NO: 10876 - RNA, 22 nt, Unknown
  Description of Unknown: Target viral genome RNA sequence
uuaugaggcuauguacacaccg

SEQ ID NO: 10877 - RNA, 22 nt, Unknown
  Description of Unknown: Target viral genome RNA sequence
uuuaugaggcuauguacacacc

SEQ ID NO: 10878 - RNA, 22 nt, Unknown
  Description of Unknown: Target viral genome RNA sequence
augaggcuauguacacaccgca

SEQ ID NO: 10879 - RNA, 22 nt, Unknown
  Description of Unknown: Target viral genome RNA sequence
uaugaggcuauguacacaccgc

SEQ ID NO: 10880 - RNA, 22 nt, Unknown
  Description of Unknown: Target viral genome RNA sequence
gaggcuauguacacaccgcaua

SEQ ID NO: 10881 - RNA, 22 nt, Unknown
  Description of Unknown: Target viral genome RNA sequence
ugaggcuauguacacaccgcau

SEQ ID NO: 10882 - RNA, 22 nt, Unknown
  Description of Unknown: Target viral genome RNA sequence
uuacauuacacauaaacgaacu

SEQ ID NO: 10883 - RNA, 22 nt, Unknown
  Description of Unknown: Target viral genome RNA sequence
auuacauuacacauaaacgaac

SEQ ID NO: 10884 - RNA, 22 nt, Unknown
  Description of Unknown: Target viral genome RNA sequence
caaauuacauuacacauaaacg

SEQ ID NO: 10885 - RNA, 22 nt, Unknown
  Description of Unknown: Target viral genome RNA sequence
ucaaauuacauuacacauaaac

SEQ ID NO: 10886 - RNA, 22 nt, Unknown
  Description of Unknown: Target viral genome RNA sequence
aauuacauuacacauaaacgaa

SEQ ID NO: 10887 - RNA, 22 nt, Unknown
  Description of Unknown: Target viral genome RNA sequence
aaauuacauuacacauaaacga

SEQ ID NO: 10888 - RNA, 22 nt, Unknown
  Description of Unknown: Target viral genome RNA sequence
gagucaaauuacauuacacaua

SEQ ID NO: 10889 - RNA, 22 nt, Unknown
  Description of Unknown: Target viral genome RNA sequence
ggagucaaauuacauuacacau

SEQ ID NO: 10890 - RNA, 22 nt, Unknown
  Description of Unknown: Target viral genome RNA sequence
gucaaauuacauuacacauaaa

SEQ ID NO: 10891 - RNA, 22 nt, Unknown
  Description of Unknown: Target viral genome RNA sequence
agucaaauuacauuacacauaa

SEQ ID NO: 10892 - RNA, 22 nt, Unknown
  Description of Unknown: Target viral genome RNA sequence
cuuauguacucauucguuucgg

SEQ ID NO: 10893 - RNA, 22 nt, Unknown
  Description of Unknown: Target viral genome RNA sequence
acuuauguacucauucguuucg

SEQ ID NO: 10894 - RNA, 22 nt, Unknown
  Description of Unknown: Target viral genome RNA sequence
aguacgaacuuauguacucauu

SEQ ID NO: 10895 - RNA, 22 nt, Unknown
  Description of Unknown: Target viral genome RNA sequence
gaguacgaacuuauguacucau

SEQ ID NO: 10896 - RNA, 22 nt, Unknown
  Description of Unknown: Target viral genome RNA sequence
uacgaacuuauguacucauucg

SEQ ID NO: 10897 - RNA, 22 nt, Unknown
  Description of Unknown: Target viral genome RNA sequence
guacgaacuuauguacucauuc

SEQ ID NO: 10898 - RNA, 22 nt, Unknown
  Description of Unknown: Target viral genome RNA sequence
cgaacuuauguacucauucguu

SEQ ID NO: 10899 - RNA, 22 nt, Unknown
  Description of Unknown: Target viral genome RNA sequence
acgaacuuauguacucauucgu

SEQ ID NO: 10900 - RNA, 22 nt, Unknown
  Description of Unknown: Target viral genome RNA sequence
aacuuauguacucauucguuuc

SEQ ID NO: 10901 - RNA, 22 nt, Unknown
  Description of Unknown: Target viral genome RNA sequence
gaacuuauguacucauucguuu

SEQ ID NO: 10902 - RNA, 22 nt, Unknown
  Description of Unknown: Target viral genome RNA sequence
gaacugauuacaaacauuggcc

SEQ ID NO: 10903 - RNA, 22 nt, Unknown
  Description of Unknown: Target viral genome RNA sequence
aacugauuacaaacauuggccg

SEQ ID NO: 10904 - RNA, 22 nt, Unknown
  Description of Unknown: Target viral genome RNA sequence
acugauuacaaacauuggccgc

SEQ ID NO: 10905 - RNA, 22 nt, Unknown
  Description of Unknown: Target viral genome RNA sequence
cugauuacaaacauuggccgca

SEQ ID NO: 10906 - RNA, 22 nt, Unknown
  Description of Unknown: Target viral genome RNA sequence
ugauuacaaacauuggccgcaa

SEQ ID NO: 10907 - RNA, 22 nt, Unknown
  Description of Unknown: Target viral genome RNA sequence
gauuacaaacauuggccgcaaa

SEQ ID NO: 10908 - RNA, 22 nt, Unknown
  Description of Unknown: Target viral genome RNA sequence
auuacaaacauuggccgcaaau

SEQ ID NO: 10909 - RNA, 22 nt, Unknown
  Description of Unknown: Target viral genome RNA sequence
uuacaaacauuggccgcaaauu

SEQ ID NO: 10910 - RNA, 22 nt, Unknown
  Description of Unknown: Target viral genome RNA sequence
uacaaacauuggccgcaaauug

SEQ ID NO: 10911 - RNA, 22 nt, Unknown
  Description of Unknown: Target viral genome RNA sequence
acaaacauuggccgcaaauugc

SEQ ID NO: 10912 - RNA, 22 nt, Unknown
  Description of Unknown: Target viral genome RNA sequence
acuauggugaugcuguuguuua

SEQ ID NO: 10913 - RNA, 22 nt, Unknown
  Description of Unknown: Target viral genome RNA sequence
ugacuauggugaugcuguuguu

SEQ ID NO: 10914 - RNA, 22 nt, Unknown
  Description of Unknown: Target viral genome RNA sequence
guaguacauuuauuagugauga

SEQ ID NO: 10915 - RNA, 22 nt, Unknown
  Description of Unknown: Target viral genome RNA sequence
uaguacauuuauuagugaugaa

SEQ ID NO: 10916 - RNA, 22 nt, Unknown
  Description of Unknown: Target viral genome RNA sequence
ugguaguacauuuauuagugau

SEQ ID NO: 10917 - RNA, 22 nt, Unknown
  Description of Unknown: Target viral genome RNA sequence
gguaguacauuuauuagugaug

SEQ ID NO: 10918 - RNA, 22 nt, Unknown
  Description of Unknown: Target viral genome RNA sequence
cugguaguacauuuauuaguga

SEQ ID NO: 10919 - RNA, 22 nt, Unknown
  Description of Unknown: Target viral genome RNA sequence
uaaauguaguagaauuauaccu

SEQ ID NO: 10920 - RNA, 22 nt, Unknown
  Description of Unknown: Target viral genome RNA sequence
cguccaacucaguuugccuguu

SEQ ID NO: 10921 - RNA, 22 nt, Unknown
  Description of Unknown: Target viral genome RNA sequence
acguccaacucaguuugccugu

SEQ ID NO: 10922 - RNA, 22 nt, Unknown
  Description of Unknown: Target viral genome RNA sequence
cacguccaacucaguuugccug

SEQ ID NO: 10923 - RNA, 22 nt, Unknown
  Description of Unknown: Target viral genome RNA sequence
cagcccuauguguucaucaaac

SEQ ID NO: 10924 - RNA, 22 nt, Unknown
  Description of Unknown: Target viral genome RNA sequence
acagcccuauguguucaucaaa

SEQ ID NO: 10925 - RNA, 22 nt, Unknown
  Description of Unknown: Target viral genome RNA sequence
aacuugaacagcccuauguguu

SEQ ID NO: 10926 - RNA, 22 nt, Unknown
  Description of Unknown: Target viral genome RNA sequence
caacuugaacagcccuaugugu

SEQ ID NO: 10927 - RNA, 22 nt, Unknown
  Description of Unknown: Target viral genome RNA sequence
cuugaacagcccuauguguuca

SEQ ID NO: 10928 - RNA, 22 nt, Unknown
  Description of Unknown: Target viral genome RNA sequence
acuugaacagcccuauguguuc

SEQ ID NO: 10929 - RNA, 22 nt, Unknown
  Description of Unknown: Target viral genome RNA sequence
ugaacagcccuauguguucauc

SEQ ID NO: 10930 - RNA, 22 nt, Unknown
  Description of Unknown: Target viral genome RNA sequence
uugaacagcccuauguguucau

SEQ ID NO: 10931 - RNA, 22 nt, Unknown
  Description of Unknown: Target viral genome RNA sequence
aacagcccuauguguucaucaa

SEQ ID NO: 10932 - RNA, 22 nt, Unknown
  Description of Unknown: Target viral genome RNA sequence
gaacagcccuauguguucauca

SEQ ID NO: 10933 - RNA, 22 nt, Unknown
  Description of Unknown: Target viral genome RNA sequence
cauaaugucugauagagaccuu

SEQ ID NO: 10934 - RNA, 22 nt, Unknown
  Description of Unknown: Target viral genome RNA sequence
gcauaaugucugauagagaccu

SEQ ID NO: 10935 - RNA, 22 nt, Unknown
  Description of Unknown: Target viral genome RNA sequence
uaaugucugauagagaccuuua

SEQ ID NO: 10936 - RNA, 22 nt, Unknown
  Description of Unknown: Target viral genome RNA sequence
auaaugucugauagagaccuuu

SEQ ID NO: 10937 - RNA, 22 nt, Unknown
  Description of Unknown: Target viral genome RNA sequence
uuugcauaaugucugauagaga

SEQ ID NO: 10938 - RNA, 22 nt, Unknown
  Description of Unknown: Target viral genome RNA sequence
ugcauaaugucugauagagacc

SEQ ID NO: 10939 - RNA, 22 nt, Unknown
  Description of Unknown: Target viral genome RNA sequence
augucugauagagaccuuuaug

SEQ ID NO: 10940 - RNA, 22 nt, Unknown
  Description of Unknown: Target viral genome RNA sequence
aaugucugauagagaccuuuau

SEQ ID NO: 10941 - RNA, 22 nt, Unknown
  Description of Unknown: Target viral genome RNA sequence
ugugauaucagacaacuacuau

SEQ ID NO: 10942 - RNA, 22 nt, Unknown
  Description of Unknown: Target viral genome RNA sequence
gugugauaucagacaacuacua

SEQ ID NO: 10943 - RNA, 22 nt, Unknown
  Description of Unknown: Target viral genome RNA sequence
acaaugugugauaucagacaac

SEQ ID NO: 10944 - RNA, 22 nt, Unknown
  Description of Unknown: Target viral genome RNA sequence
caacaaugugugauaucagaca

SEQ ID NO: 10945 - RNA, 22 nt, Unknown
  Description of Unknown: Target viral genome RNA sequence
ccaacaaugugugauaucagac

SEQ ID NO: 10946 - RNA, 22 nt, Unknown
  Description of Unknown: Target viral genome RNA sequence
ugugugauaucagacaacuacu

SEQ ID NO: 10947 - RNA, 22 nt, Unknown
  Description of Unknown: Target viral genome RNA sequence
augugugauaucagacaacuac

SEQ ID NO: 10948 - RNA, 22 nt, Unknown
  Description of Unknown: Target viral genome RNA sequence
aaugugugauaucagacaacua

SEQ ID NO: 10949 - RNA, 22 nt, Unknown
  Description of Unknown: Target viral genome RNA sequence
caaugugugauaucagacaacu

SEQ ID NO: 10950 - RNA, 22 nt, Unknown
  Description of Unknown: Target viral genome RNA sequence
gcaaugcuccagguugugaugu

SEQ ID NO: 10951 - RNA, 22 nt, Unknown
  Description of Unknown: Target viral genome RNA sequence
caaugcuccagguugugauguc

SEQ ID NO: 10952 - RNA, 22 nt, Unknown
  Description of Unknown: Target viral genome RNA sequence
aaugcuccagguugugauguca

SEQ ID NO: 10953 - RNA, 22 nt, Unknown
  Description of Unknown: Target viral genome RNA sequence
ucauaacagaugcgcaaacagg

SEQ ID NO: 10954 - RNA, 22 nt, Unknown
  Description of Unknown: Target viral genome RNA sequence
uucauaacagaugcgcaaacag

SEQ ID NO: 10955 - RNA, 22 nt, Unknown
  Description of Unknown: Target viral genome RNA sequence
uuucauaacagaugcgcaaaca

SEQ ID NO: 10956 - RNA, 22 nt, Unknown
  Description of Unknown: Target viral genome RNA sequence
auuucauaacagaugcgcaaac

SEQ ID NO: 10957 - RNA, 22 nt, Unknown
  Description of Unknown: Target viral genome RNA sequence
augcuccagguugugaugucac

SEQ ID NO: 10958 - RNA, 22 nt, Unknown
  Description of Unknown: Target viral genome RNA sequence
augccugcuaguugggugaugc

SEQ ID NO: 10959 - RNA, 22 nt, Unknown
  Description of Unknown: Target viral genome RNA sequence
gccugcuaguugggugaugcgu

SEQ ID NO: 10960 - RNA, 22 nt, Unknown
  Description of Unknown: Target viral genome RNA sequence
ugccugcuaguugggugaugcg

SEQ ID NO: 10961 - RNA, 22 nt, Unknown
  Description of Unknown: Target viral genome RNA sequence
cugcuaguugggugaugcguau

SEQ ID NO: 10962 - RNA, 22 nt, Unknown
  Description of Unknown: Target viral genome RNA sequence
ccugcuaguugggugaugcgua

SEQ ID NO: 10963 - RNA, 22 nt, Unknown
  Description of Unknown: Target viral genome RNA sequence
gguucaccaucugguguuuacc

SEQ ID NO: 10964 - RNA, 22 nt, Unknown
  Description of Unknown: Target viral genome RNA sequence
augguucaccaucugguguuua

SEQ ID NO: 10965 - RNA, 22 nt, Unknown
  Description of Unknown: Target viral genome RNA sequence
ugguucaccaucugguguuuac

SEQ ID NO: 10966 - RNA, 22 nt, Unknown
  Description of Unknown: Target viral genome RNA sequence
caaugguucaccaucugguguu

SEQ ID NO: 10967 - RNA, 22 nt, Unknown
  Description of Unknown: Target viral genome RNA sequence
aaugguucaccaucugguguuu

SEQ ID NO: 10968 - RNA, 22 nt, Unknown
  Description of Unknown: Target viral genome RNA sequence
uacaaugguucaccaucuggug

SEQ ID NO: 10969 - RNA, 22 nt, Unknown
  Description of Unknown: Target viral genome RNA sequence
acaaugguucaccaucuggugu

SEQ ID NO: 10970 - RNA, 22 nt, Unknown
  Description of Unknown: Target viral genome RNA sequence
guuacaaugguucaccaucugg

SEQ ID NO: 10971 - RNA, 22 nt, Unknown
  Description of Unknown: Target viral genome RNA sequence
uuacaaugguucaccaucuggu

SEQ ID NO: 10972 - RNA, 22 nt, Unknown
  Description of Unknown: Target viral genome RNA sequence
aguuuuggaccacuagugagaa

SEQ ID NO: 10973 - RNA, 22 nt, Unknown
  Description of Unknown: Target viral genome RNA sequence
guuuuggaccacuagugagaaa

SEQ ID NO: 10974 - RNA, 22 nt, Unknown
  Description of Unknown: Target viral genome RNA sequence
ugaaauuguugacacugugagu

SEQ ID NO: 10975 - RNA, 22 nt, Unknown
  Description of Unknown: Target viral genome RNA sequence
gaaauuguugacacugugagug

SEQ ID NO: 10976 - RNA, 22 nt, Unknown
  Description of Unknown: Target viral genome RNA sequence
acugugacucuucuuccugcug

SEQ ID NO: 10977 - RNA, 22 nt, Unknown
  Description of Unknown: Target viral genome RNA sequence
cugugacucuucuuccugcugc

SEQ ID NO: 10978 - RNA, 22 nt, Unknown
  Description of Unknown: Target viral genome RNA sequence
uauuacuagauaaacgcacuac

SEQ ID NO: 10979 - RNA, 22 nt, Unknown
  Description of Unknown: Target viral genome RNA sequence
gucaagcguggcaaccgggugu

SEQ ID NO: 10980 - RNA, 22 nt, Unknown
  Description of Unknown: Target viral genome RNA sequence
ucaagcguggcaaccggguguu

SEQ ID NO: 10981 - RNA, 22 nt, Unknown
  Description of Unknown: Target viral genome RNA sequence
agucaagcguggcaaccgggug

SEQ ID NO: 10982 - RNA, 22 nt, Unknown
  Description of Unknown: Target viral genome RNA sequence
cguugcacuucuugcuguuuuu

SEQ ID NO: 10983 - RNA, 22 nt, Unknown
  Description of Unknown: Target viral genome RNA sequence
uggcguugcacuucuugcuguu

SEQ ID NO: 10984 - RNA, 22 nt, Unknown
  Description of Unknown: Target viral genome RNA sequence
uuggcguugcacuucuugcugu

SEQ ID NO: 10985 - RNA, 22 nt, Unknown
  Description of Unknown: Target viral genome RNA sequence
auguucuuuaccaaccaccaca

SEQ ID NO: 10986 - RNA, 22 nt, Unknown
  Description of Unknown: Target viral genome RNA sequence
acugcugccgugaacaugagca

SEQ ID NO: 10987 - RNA, 22 nt, Unknown
  Description of Unknown: Target viral genome RNA sequence
cugcugccgugaacaugagcau

SEQ ID NO: 10988 - RNA, 22 nt, Unknown
  Description of Unknown: Target viral genome RNA sequence
ugcugccgugaacaugagcaug

SEQ ID NO: 10989 - RNA, 22 nt, Unknown
  Description of Unknown: Target viral genome RNA sequence
gcugccgugaacaugagcauga

SEQ ID NO: 10990 - RNA, 22 nt, Unknown
  Description of Unknown: Target viral genome RNA sequence
uacugcugccgugaacaugagc

SEQ ID NO: 10991 - RNA, 22 nt, Unknown
  Description of Unknown: Target viral genome RNA sequence
cugccgugaacaugagcaugaa

SEQ ID NO: 10992 - RNA, 22 nt, Unknown
  Description of Unknown: Target viral genome RNA sequence
ugccgugaacaugagcaugaaa

SEQ ID NO: 10993 - RNA, 22 nt, Unknown
  Description of Unknown: Target viral genome RNA sequence
uuuacaaacaauuugauacuua

SEQ ID NO: 10994 - RNA, 22 nt, Unknown
  Description of Unknown: Target viral genome RNA sequence
guuuacaaacaauuugauacuu

SEQ ID NO: 10995 - RNA, 22 nt, Unknown
  Description of Unknown: Target viral genome RNA sequence
uacaaacaauuugauacuuaua

SEQ ID NO: 10996 - RNA, 22 nt, Unknown
  Description of Unknown: Target viral genome RNA sequence
uuacaaacaauuugauacuuau

SEQ ID NO: 10997 - RNA, 22 nt, Unknown
  Description of Unknown: Target viral genome RNA sequence
uggguuuacaaacaauuugaua

SEQ ID NO: 10998 - RNA, 22 nt, Unknown
  Description of Unknown: Target viral genome RNA sequence
gguuuacaaacaauuugauacu

SEQ ID NO: 10999 - RNA, 22 nt, Unknown
  Description of Unknown: Target viral genome RNA sequence
ggguuuacaaacaauuugauac

SEQ ID NO: 11000 - RNA, 22 nt, Unknown
  Description of Unknown: Target viral genome RNA sequence
caaacaauuugauacuuauaac

SEQ ID NO: 11001 - RNA, 22 nt, Unknown
  Description of Unknown: Target viral genome RNA sequence
acaaacaauuugauacuuauaa

SEQ ID NO: 11002 - RNA, 22 nt, Unknown
  Description of Unknown: Target viral genome RNA sequence
uauugaaaucaauagccgccac

SEQ ID NO: 11003 - RNA, 22 nt, Unknown
  Description of Unknown: Target viral genome RNA sequence
auugaaaucaauagccgccacu

SEQ ID NO: 11004 - RNA, 22 nt, Unknown
  Description of Unknown: Target viral genome RNA sequence
uugaaaucaauagccgccacua

SEQ ID NO: 11005 - RNA, 22 nt, Unknown
  Description of Unknown: Target viral genome RNA sequence
ugaaaucaauagccgccacuag

SEQ ID NO: 11006 - RNA, 22 nt, Unknown
  Description of Unknown: Target viral genome RNA sequence
aaauuauugaaaucaauagccg

SEQ ID NO: 11007 - RNA, 22 nt, Unknown
  Description of Unknown: Target viral genome RNA sequence
aauuauugaaaucaauagccgc

SEQ ID NO: 11008 - RNA, 22 nt, Unknown
  Description of Unknown: Target viral genome RNA sequence
auuauugaaaucaauagccgcc

SEQ ID NO: 11009 - RNA, 22 nt, Unknown
  Description of Unknown: Target viral genome RNA sequence
uuauugaaaucaauagccgcca

SEQ ID NO: 11010 - RNA, 22 nt, Unknown
  Description of Unknown: Target viral genome RNA sequence
gaaaucaauagccgccacuaga

SEQ ID NO: 11011 - RNA, 22 nt, Unknown
  Description of Unknown: Target viral genome RNA sequence
aaaucaauagccgccacuagag

SEQ ID NO: 11012 - RNA, 22 nt, Unknown
  Description of Unknown: Target viral genome RNA sequence
caaauaccuacaacuugugcua

SEQ ID NO: 11013 - RNA, 22 nt, Unknown
  Description of Unknown: Target viral genome RNA sequence
uacccaauaauacugcgucuug

SEQ ID NO: 11014 - RNA, 22 nt, Unknown
  Description of Unknown: Target viral genome RNA sequence
acccaauaauacugcgucuugg

SEQ ID NO: 11015 - RNA, 22 nt, Unknown
  Description of Unknown: Target viral genome RNA sequence
guuugcaaugcuccagguugug

SEQ ID NO: 11016 - RNA, 22 nt, Unknown
  Description of Unknown: Target viral genome RNA sequence
cucuugguguuuaugauuacuu

SEQ ID NO: 11017 - RNA, 22 nt, Unknown
  Description of Unknown: Target viral genome RNA sequence
acucuugguguuuaugauuacu

SEQ ID NO: 11018 - RNA, 22 nt, Unknown
  Description of Unknown: Target viral genome RNA sequence
uaugucuuuacugguuaucgug

SEQ ID NO: 11019 - RNA, 22 nt, Unknown
  Description of Unknown: Target viral genome RNA sequence
gaaauuaugucuuuacugguua

SEQ ID NO: 11020 - RNA, 22 nt, Unknown
  Description of Unknown: Target viral genome RNA sequence
aauuaugucuuuacugguuauc

SEQ ID NO: 11021 - RNA, 22 nt, Unknown
  Description of Unknown: Target viral genome RNA sequence
auuuccuaauauuacaaacuug

SEQ ID NO: 11022 - RNA, 22 nt, Unknown
  Description of Unknown: Target viral genome RNA sequence
gauuuccuaauauuacaaacuu

SEQ ID NO: 11023 - RNA, 22 nt, Unknown
  Description of Unknown: Target viral genome RNA sequence
uuccuaauauuacaaacuugug

SEQ ID NO: 11024 - RNA, 22 nt, Unknown
  Description of Unknown: Target viral genome RNA sequence
uuuccuaauauuacaaacuugu

SEQ ID NO: 11025 - RNA, 22 nt, Unknown
  Description of Unknown: Target viral genome RNA sequence
ccuaauauuacaaacuugugcc

SEQ ID NO: 11026 - RNA, 22 nt, Unknown
  Description of Unknown: Target viral genome RNA sequence
uaauauuacaaacuugugcccu

SEQ ID NO: 11027 - RNA, 22 nt, Unknown
  Description of Unknown: Target viral genome RNA sequence
cuaauauuacaaacuugugccc

SEQ ID NO: 11028 - RNA, 22 nt, Unknown
  Description of Unknown: Target viral genome RNA sequence
auauuacaaacuugugcccuuu

SEQ ID NO: 11029 - RNA, 22 nt, Unknown
  Description of Unknown: Target viral genome RNA sequence
aauauuacaaacuugugcccuu

SEQ ID NO: 11030 - RNA, 22 nt, Unknown
  Description of Unknown: Target viral genome RNA sequence
ggaacuugucggcguuguccug

SEQ ID NO: 11031 - RNA, 22 nt, Unknown
  Description of Unknown: Target viral genome RNA sequence
gaacuugucggcguuguccugc

SEQ ID NO: 11032 - RNA, 22 nt, Unknown
  Description of Unknown: Target viral genome RNA sequence
aacuugucggcguuguccugcu

SEQ ID NO: 11033 - RNA, 22 nt, Unknown
  Description of Unknown: Target viral genome RNA sequence
acuugucggcguuguccugcug

SEQ ID NO: 11034 - RNA, 22 nt, Unknown
  Description of Unknown: Target viral genome RNA sequence
cuugucggcguuguccugcuga

SEQ ID NO: 11035 - RNA, 22 nt, Unknown
  Description of Unknown: Target viral genome RNA sequence
gaguuccugaucuucuggucua

SEQ ID NO: 11036 - RNA, 22 nt, Unknown
  Description of Unknown: Target viral genome RNA sequence
aguuccugaucuucuggucuaa

SEQ ID NO: 11037 - RNA, 22 nt, Unknown
  Description of Unknown: Target viral genome RNA sequence
agaguuccugaucuucuggucu

SEQ ID NO: 11038 - RNA, 22 nt, Unknown
  Description of Unknown: Target viral genome RNA sequence
cugguggcacuacugaaaugcu

SEQ ID NO: 11039 - RNA, 22 nt, Unknown
  Description of Unknown: Target viral genome RNA sequence
cuucguaagaacgguaauaaag

SEQ ID NO: 11040 - RNA, 22 nt, Unknown
  Description of Unknown: Target viral genome RNA sequence
uucguaagaacgguaauaaagg

SEQ ID NO: 11041 - RNA, 22 nt, Unknown
  Description of Unknown: Target viral genome RNA sequence
ucguaagaacgguaauaaagga

SEQ ID NO: 11042 - RNA, 22 nt, Unknown
  Description of Unknown: Target viral genome RNA sequence
cguaagaacgguaauaaaggag

SEQ ID NO: 11043 - RNA, 22 nt, Unknown
  Description of Unknown: Target viral genome RNA sequence
ucuucuucguaagaacgguaau

SEQ ID NO: 11044 - RNA, 22 nt, Unknown
  Description of Unknown: Target viral genome RNA sequence
cuucuucguaagaacgguaaua

SEQ ID NO: 11045 - RNA, 22 nt, Unknown
  Description of Unknown: Target viral genome RNA sequence
uucuucguaagaacgguaauaa

SEQ ID NO: 11046 - RNA, 22 nt, Unknown
  Description of Unknown: Target viral genome RNA sequence
ucuucguaagaacgguaauaaa

SEQ ID NO: 11047 - RNA, 22 nt, Unknown
  Description of Unknown: Target viral genome RNA sequence
guaagaacgguaauaaaggagc

SEQ ID NO: 11048 - RNA, 22 nt, Unknown
  Description of Unknown: Target viral genome RNA sequence
uuaucacccgcgaagaagcuau

SEQ ID NO: 11049 - RNA, 22 nt, Unknown
  Description of Unknown: Target viral genome RNA sequence
uuuaucacccgcgaagaagcua

SEQ ID NO: 11050 - RNA, 22 nt, Unknown
  Description of Unknown: Target viral genome RNA sequence
uaucacccgcgaagaagcuaua

SEQ ID NO: 11051 - RNA, 22 nt, Unknown
  Description of Unknown: Target viral genome RNA sequence
acugucuuuuuugaugguagag

SEQ ID NO: 11052 - RNA, 22 nt, Unknown
  Description of Unknown: Target viral genome RNA sequence
cugucuuuuuugaugguagagu

SEQ ID NO: 11053 - RNA, 22 nt, Unknown
  Description of Unknown: Target viral genome RNA sequence
gcuagggagagcugccuauaug

SEQ ID NO: 11054 - RNA, 22 nt, Unknown
  Description of Unknown: Target viral genome RNA sequence
cuagggagagcugccuauaugg

SEQ ID NO: 11055 - RNA, 22 nt, Unknown
  Description of Unknown: Target viral genome RNA sequence
uagggagagcugccuauaugga

SEQ ID NO: 11056 - RNA, 22 nt, Unknown
  Description of Unknown: Target viral genome RNA sequence
agggagagcugccuauauggaa

SEQ ID NO: 11057 - RNA, 22 nt, Unknown
  Description of Unknown: Target viral genome RNA sequence
gggagagcugccuauauggaag

SEQ ID NO: 11058 - RNA, 22 nt, Unknown
  Description of Unknown: Target viral genome RNA sequence
cuaaucagacaaggaacugauu

SEQ ID NO: 11059 - RNA, 22 nt, Unknown
  Description of Unknown: Target viral genome RNA sequence
uuuuagccuuucugcuauuccu

SEQ ID NO: 11060 - RNA, 22 nt, Unknown
  Description of Unknown: Target viral genome RNA sequence
uuuuuagccuuucugcuauucc

SEQ ID NO: 11061 - RNA, 22 nt, Unknown
  Description of Unknown: Target viral genome RNA sequence
uuagccuuucugcuauuccuug

SEQ ID NO: 11062 - RNA, 22 nt, Unknown
  Description of Unknown: Target viral genome RNA sequence
uuuagccuuucugcuauuccuu

SEQ ID NO: 11063 - RNA, 22 nt, Unknown
  Description of Unknown: Target viral genome RNA sequence
agccuuucugcuauuccuuguu

SEQ ID NO: 11064 - RNA, 22 nt, Unknown
  Description of Unknown: Target viral genome RNA sequence
uagccuuucugcuauuccuugu

SEQ ID NO: 11065 - RNA, 22 nt, Unknown
  Description of Unknown: Target viral genome RNA sequence
gccuuucugcuauuccuuguuu

SEQ ID NO: 11066 - RNA, 22 nt, Unknown
  Description of Unknown: Target viral genome RNA sequence
uuucugcuauuccuuguuuuaa

SEQ ID NO: 11067 - RNA, 22 nt, Unknown
  Description of Unknown: Target viral genome RNA sequence
cuuucugcuauuccuuguuuua

SEQ ID NO: 11068 - RNA, 22 nt, Unknown
  Description of Unknown: Target viral genome RNA sequence
gaacauacgagggcaauucacc

SEQ ID NO: 11069 - RNA, 22 nt, Unknown
  Description of Unknown: Target viral genome RNA sequence
aacauacgagggcaauucacca

SEQ ID NO: 11070 - RNA, 22 nt, Unknown
  Description of Unknown: Target viral genome RNA sequence
uggaacauacgagggcaauuca

SEQ ID NO: 11071 - RNA, 22 nt, Unknown
  Description of Unknown: Target viral genome RNA sequence
ggaacauacgagggcaauucac

SEQ ID NO: 11072 - RNA, 22 nt, Unknown
  Description of Unknown: Target viral genome RNA sequence
auacgagggcaauucaccauuu

SEQ ID NO: 11073 - RNA, 22 nt, Unknown
  Description of Unknown: Target viral genome RNA sequence
uacgagggcaauucaccauuuc

SEQ ID NO: 11074 - RNA, 22 nt, Unknown
  Description of Unknown: Target viral genome RNA sequence
acauacgagggcaauucaccau

SEQ ID NO: 11075 - RNA, 22 nt, Unknown
  Description of Unknown: Target viral genome RNA sequence
cauacgagggcaauucaccauu

SEQ ID NO: 11076 - RNA, 22 nt, Unknown
  Description of Unknown: Target viral genome RNA sequence
acgagggcaauucaccauuuca

SEQ ID NO: 11077 - RNA, 22 nt, Unknown
  Description of Unknown: Target viral genome RNA sequence
cgagggcaauucaccauuucau

SEQ ID NO: 11078 - RNA, 22 nt, Unknown
  Description of Unknown: Target viral genome RNA sequence
cuuuaugagugucucuauagaa

SEQ ID NO: 11079 - RNA, 22 nt, Unknown
  Description of Unknown: Target viral genome RNA sequence
uuuaugagugucucuauagaaa

SEQ ID NO: 11080 - RNA, 22 nt, Unknown
  Description of Unknown: Target viral genome RNA sequence
augagugucucuauagaaauag

SEQ ID NO: 11081 - RNA, 22 nt, Unknown
  Description of Unknown: Target viral genome RNA sequence
ugagugucucuauagaaauaga

SEQ ID NO: 11082 - RNA, 22 nt, Unknown
  Description of Unknown: Target viral genome RNA sequence
uuaugagugucucuauagaaau

SEQ ID NO: 11083 - RNA, 22 nt, Unknown
  Description of Unknown: Target viral genome RNA sequence
uaugagugucucuauagaaaua

SEQ ID NO: 11084 - RNA, 22 nt, Unknown
  Description of Unknown: Target viral genome RNA sequence
gagugucucuauagaaauagag

SEQ ID NO: 11085 - RNA, 22 nt, Unknown
  Description of Unknown: Target viral genome RNA sequence
agugucucuauagaaauagaga

SEQ ID NO: 11086 - RNA, 22 nt, Unknown
  Description of Unknown: Target viral genome RNA sequence
aggaguaugcugaugucuuuca

SEQ ID NO: 11087 - RNA, 22 nt, Unknown
  Description of Unknown: Target viral genome RNA sequence
caggaguaugcugaugucuuuc

SEQ ID NO: 11088 - RNA, 22 nt, Unknown
  Description of Unknown: Target viral genome RNA sequence
aaucaggaguaugcugaugucu

SEQ ID NO: 11089 - RNA, 22 nt, Unknown
  Description of Unknown: Target viral genome RNA sequence
uaaucaggaguaugcugauguc

SEQ ID NO: 11090 - RNA, 22 nt, Unknown
  Description of Unknown: Target viral genome RNA sequence
ucaggaguaugcugaugucuuu

SEQ ID NO: 11091 - RNA, 22 nt, Unknown
  Description of Unknown: Target viral genome RNA sequence
aucaggaguaugcugaugucuu

SEQ ID NO: 11092 - RNA, 22 nt, Unknown
  Description of Unknown: Target viral genome RNA sequence
uccuaaucaggaguaugcugau

SEQ ID NO: 11093 - RNA, 22 nt, Unknown
  Description of Unknown: Target viral genome RNA sequence
auccuaaucaggaguaugcuga

SEQ ID NO: 11094 - RNA, 22 nt, Unknown
  Description of Unknown: Target viral genome RNA sequence
cuaaucaggaguaugcugaugu

SEQ ID NO: 11095 - RNA, 22 nt, Unknown
  Description of Unknown: Target viral genome RNA sequence
ccuaaucaggaguaugcugaug

SEQ ID NO: 11096 - RNA, 22 nt, Unknown
  Description of Unknown: Target viral genome RNA sequence
caauaucucagaugaguuuucu

SEQ ID NO: 11097 - RNA, 22 nt, Unknown
  Description of Unknown: Target viral genome RNA sequence
ucaauaucucagaugaguuuuc

SEQ ID NO: 11098 - RNA, 22 nt, Unknown
  Description of Unknown: Target viral genome RNA sequence
cucaauaucucagaugaguuuu

SEQ ID NO: 11099 - RNA, 22 nt, Unknown
  Description of Unknown: Target viral genome RNA sequence
acucaauaucucagaugaguuu

SEQ ID NO: 11100 - RNA, 22 nt, Unknown
  Description of Unknown: Target viral genome RNA sequence
auaucucagaugaguuuucuag

SEQ ID NO: 11101 - RNA, 22 nt, Unknown
  Description of Unknown: Target viral genome RNA sequence
aauaucucagaugaguuuucua

SEQ ID NO: 11102 - RNA, 22 nt, Unknown
  Description of Unknown: Target viral genome RNA sequence
cuuguucuugcucgcaaacaua

SEQ ID NO: 11103 - RNA, 22 nt, Unknown
  Description of Unknown: Target viral genome RNA sequence
acuuguucuugcucgcaaacau

SEQ ID NO: 11104 - RNA, 22 nt, Unknown
  Description of Unknown: Target viral genome RNA sequence
uuguucuugcucgcaaacauac

SEQ ID NO: 11105 - RNA, 22 nt, Unknown
  Description of Unknown: Target viral genome RNA sequence
cucacuuguucuugcucgcaaa

SEQ ID NO: 11106 - RNA, 22 nt, Unknown
  Description of Unknown: Target viral genome RNA sequence
ccucacuuguucuugcucgcaa

SEQ ID NO: 11107 - RNA, 22 nt, Unknown
  Description of Unknown: Target viral genome RNA sequence
cacuuguucuugcucgcaaaca

SEQ ID NO: 11108 - RNA, 22 nt, Unknown
  Description of Unknown: Target viral genome RNA sequence
ucacuuguucuugcucgcaaac

SEQ ID NO: 11109 - RNA, 22 nt, Unknown
  Description of Unknown: Target viral genome RNA sequence
acgcaugauguuucaucugcaa

SEQ ID NO: 11110 - RNA, 22 nt, Unknown
  Description of Unknown: Target viral genome RNA sequence
cgcaugauguuucaucugcaau

SEQ ID NO: 11111 - RNA, 22 nt, Unknown
  Description of Unknown: Target viral genome RNA sequence
caugauguuucaucugcaauua

SEQ ID NO: 11112 - RNA, 22 nt, Unknown
  Description of Unknown: Target viral genome RNA sequence
augauguuucaucugcaauuaa

SEQ ID NO: 11113 - RNA, 22 nt, Unknown
  Description of Unknown: Target viral genome RNA sequence
gauguuucaucugcaauuaaca

SEQ ID NO: 11114 - RNA, 22 nt, Unknown
  Description of Unknown: Target viral genome RNA sequence
auguuucaucugcaauuaacag

SEQ ID NO: 11115 - RNA, 22 nt, Unknown
  Description of Unknown: Target viral genome RNA sequence
ugaccguuauuuuaaauauugg

SEQ ID NO: 11116 - RNA, 22 nt, Unknown
  Description of Unknown: Target viral genome RNA sequence
uugaccguuauuuuaaauauug

SEQ ID NO: 11117 - RNA, 22 nt, Unknown
  Description of Unknown: Target viral genome RNA sequence
uuugaccguuauuuuaaauauu

SEQ ID NO: 11118 - RNA, 22 nt, Unknown
  Description of Unknown: Target viral genome RNA sequence
cuuugaccguuauuuuaaauau

SEQ ID NO: 11119 - RNA, 22 nt, Unknown
  Description of Unknown: Target viral genome RNA sequence
ucuuugaccguuauuuuaaaua

SEQ ID NO: 11120 - RNA, 22 nt, Unknown
  Description of Unknown: Target viral genome RNA sequence
cucuuugaccguuauuuuaaau

SEQ ID NO: 11121 - RNA, 22 nt, Unknown
  Description of Unknown: Target viral genome RNA sequence
accguuauuuuaaauauuggga

SEQ ID NO: 11122 - RNA, 22 nt, Unknown
  Description of Unknown: Target viral genome RNA sequence
gaccguuauuuuaaauauuggg

SEQ ID NO: 11123 - RNA, 22 nt, Unknown
  Description of Unknown: Target viral genome RNA sequence
cacguugcaauuuagguggugc

SEQ ID NO: 11124 - RNA, 22 nt, Unknown
  Description of Unknown: Target viral genome RNA sequence
acguugcaauuuagguggugcu

SEQ ID NO: 11125 - RNA, 22 nt, Unknown
  Description of Unknown: Target viral genome RNA sequence
cguugcaauuuagguggugcug

SEQ ID NO: 11126 - RNA, 22 nt, Unknown
  Description of Unknown: Target viral genome RNA sequence
guugcaauuuagguggugcugu

SEQ ID NO: 11127 - RNA, 22 nt, Unknown
  Description of Unknown: Target viral genome RNA sequence
ugcaauuuagguggugcugucu

SEQ ID NO: 11128 - RNA, 22 nt, Unknown
  Description of Unknown: Target viral genome RNA sequence
gcaauuuagguggugcugucug

SEQ ID NO: 11129 - RNA, 22 nt, Unknown
  Description of Unknown: Target viral genome RNA sequence
aaucuuaaguaugccauuagug

SEQ ID NO: 11130 - RNA, 22 nt, Unknown
  Description of Unknown: Target viral genome RNA sequence
gaaucuuaaguaugccauuagu

SEQ ID NO: 11131 - RNA, 22 nt, Unknown
  Description of Unknown: Target viral genome RNA sequence
ugaaucuuaaguaugccauuag

SEQ ID NO: 11132 - RNA, 22 nt, Unknown
  Description of Unknown: Target viral genome RNA sequence
augaaucuuaaguaugccauua

SEQ ID NO: 11133 - RNA, 22 nt, Unknown
  Description of Unknown: Target viral genome RNA sequence
aaugaaucuuaaguaugccauu

SEQ ID NO: 11134 - RNA, 22 nt, Unknown
  Description of Unknown: Target viral genome RNA sequence
aaaugaaucuuaaguaugccau

SEQ ID NO: 11135 - RNA, 22 nt, Unknown
  Description of Unknown: Target viral genome RNA sequence
caaaugaaucuuaaguaugcca

SEQ ID NO: 11136 - RNA, 22 nt, Unknown
  Description of Unknown: Target viral genome RNA sequence
ucaaaugaaucuuaaguaugcc

SEQ ID NO: 11137 - RNA, 22 nt, Unknown
  Description of Unknown: Target viral genome RNA sequence
ucuuaaguaugccauuagugca

SEQ ID NO: 11138 - RNA, 22 nt, Unknown
  Description of Unknown: Target viral genome RNA sequence
aucuuaaguaugccauuagugc

SEQ ID NO: 11139 - RNA, 22 nt, Unknown
  Description of Unknown: Target viral genome RNA sequence
auguuguguacacacacuggua

SEQ ID NO: 11140 - RNA, 22 nt, Unknown
  Description of Unknown: Target viral genome RNA sequence
gauguuguguacacacacuggu

SEQ ID NO: 11141 - RNA, 22 nt, Unknown
  Description of Unknown: Target viral genome RNA sequence
uaagauguuguguacacacacu

SEQ ID NO: 11142 - RNA, 22 nt, Unknown
  Description of Unknown: Target viral genome RNA sequence
uuaagauguuguguacacacac

SEQ ID NO: 11143 - RNA, 22 nt, Unknown
  Description of Unknown: Target viral genome RNA sequence
agauguuguguacacacacugg

SEQ ID NO: 11144 - RNA, 22 nt, Unknown
  Description of Unknown: Target viral genome RNA sequence
aagauguuguguacacacacug

SEQ ID NO: 11145 - RNA, 22 nt, Unknown
  Description of Unknown: Target viral genome RNA sequence
guguuaagauguuguguacaca

SEQ ID NO: 11146 - RNA, 22 nt, Unknown
  Description of Unknown: Target viral genome RNA sequence
uguguuaagauguuguguacac

SEQ ID NO: 11147 - RNA, 22 nt, Unknown
  Description of Unknown: Target viral genome RNA sequence
guuaagauguuguguacacaca

SEQ ID NO: 11148 - RNA, 22 nt, Unknown
  Description of Unknown: Target viral genome RNA sequence
uguuaagauguuguguacacac

SEQ ID NO: 11149 - RNA, 22 nt, Unknown
  Description of Unknown: Target viral genome RNA sequence
caucugaagcauuuuuaauugg

SEQ ID NO: 11150 - RNA, 22 nt, Unknown
  Description of Unknown: Target viral genome RNA sequence
ucaucugaagcauuuuuaauug

SEQ ID NO: 11151 - RNA, 22 nt, Unknown
  Description of Unknown: Target viral genome RNA sequence
aucaucugaagcauuuuuaauu

SEQ ID NO: 11152 - RNA, 22 nt, Unknown
  Description of Unknown: Target viral genome RNA sequence
caucaucugaagcauuuuuaau

SEQ ID NO: 11153 - RNA, 22 nt, Unknown
  Description of Unknown: Target viral genome RNA sequence
aaauguaguagaauuauaccug

SEQ ID NO: 11154 - RNA, 22 nt, Unknown
  Description of Unknown: Target viral genome RNA sequence
aauguaguagaauuauaccugc

SEQ ID NO: 11155 - RNA, 22 nt, Unknown
  Description of Unknown: Target viral genome RNA sequence
cagcagccaaacuaaugguugu

SEQ ID NO: 11156 - RNA, 22 nt, Unknown
  Description of Unknown: Target viral genome RNA sequence
acagcagccaaacuaaugguug

SEQ ID NO: 11157 - RNA, 22 nt, Unknown
  Description of Unknown: Target viral genome RNA sequence
uaaucaguguguaacauuaggg

SEQ ID NO: 11158 - RNA, 22 nt, Unknown
  Description of Unknown: Target viral genome RNA sequence
uuaaucaguguguaacauuagg

SEQ ID NO: 11159 - RNA, 22 nt, Unknown
  Description of Unknown: Target viral genome RNA sequence
gacuugaaagagccaccacauu

SEQ ID NO: 11160 - RNA, 22 nt, Unknown
  Description of Unknown: Target viral genome RNA sequence
aaucaguguguaacauuaggga

SEQ ID NO: 11161 - RNA, 22 nt, Unknown
  Description of Unknown: Target viral genome RNA sequence
ucuuuaaucaguguguaacauu

SEQ ID NO: 11162 - RNA, 22 nt, Unknown
  Description of Unknown: Target viral genome RNA sequence
aucuuuaaucaguguguaacau

SEQ ID NO: 11163 - RNA, 22 nt, Unknown
  Description of Unknown: Target viral genome RNA sequence
uuuaaucaguguguaacauuag

SEQ ID NO: 11164 - RNA, 22 nt, Unknown
  Description of Unknown: Target viral genome RNA sequence
cuuuaaucaguguguaacauua

SEQ ID NO: 11165 - RNA, 22 nt, Unknown
  Description of Unknown: Target viral genome RNA sequence
cuugaaagagccaccacauuuu

SEQ ID NO: 11166 - RNA, 22 nt, Unknown
  Description of Unknown: Target viral genome RNA sequence
acuugaaagagccaccacauuu

SEQ ID NO: 11167 - RNA, 22 nt, Unknown
  Description of Unknown: Target viral genome RNA sequence
caguaggggaacuucuccugcu

SEQ ID NO: 11168 - RNA, 22 nt, Unknown
  Description of Unknown: Target viral genome RNA sequence
acuuugcugugucuaaggguuu

SEQ ID NO: 11169 - RNA, 22 nt, Unknown
  Description of Unknown: Target viral genome RNA sequence
cuuugcugugucuaaggguuuc

SEQ ID NO: 11170 - RNA, 22 nt, Unknown
  Description of Unknown: Target viral genome RNA sequence
uuugcugugucuaaggguuucu

SEQ ID NO: 11171 - RNA, 22 nt, Unknown
  Description of Unknown: Target viral genome RNA sequence
uugcugugucuaaggguuucuu

SEQ ID NO: 11172 - RNA, 22 nt, Unknown
  Description of Unknown: Target viral genome RNA sequence
ugcugugucuaaggguuucuuu

SEQ ID NO: 11173 - RNA, 22 nt, Unknown
  Description of Unknown: Target viral genome RNA sequence
gcugugucuaaggguuucuuua

SEQ ID NO: 11174 - RNA, 22 nt, Unknown
  Description of Unknown: Target viral genome RNA sequence
ugugucuaaggguuucuuuaag

SEQ ID NO: 11175 - RNA, 22 nt, Unknown
  Description of Unknown: Target viral genome RNA sequence
gugucuaaggguuucuuuaagg

SEQ ID NO: 11176 - RNA, 22 nt, Unknown
  Description of Unknown: Target viral genome RNA sequence
ugucuaaggguuucuuuaagga

SEQ ID NO: 11177 - RNA, 22 nt, Unknown
  Description of Unknown: Target viral genome RNA sequence
cuugucgauucagaucuuaaug

SEQ ID NO: 11178 - RNA, 22 nt, Unknown
  Description of Unknown: Target viral genome RNA sequence
uugucgauucagaucuuaauga

SEQ ID NO: 11179 - RNA, 22 nt, Unknown
  Description of Unknown: Target viral genome RNA sequence
gcuugucgauucagaucuuaau

SEQ ID NO: 11180 - RNA, 22 nt, Unknown
  Description of Unknown: Target viral genome RNA sequence
ugcuaguuuauuguuucuuagg

SEQ ID NO: 11181 - RNA, 22 nt, Unknown
  Description of Unknown: Target viral genome RNA sequence
gcuaguuuauuguuucuuaggc

SEQ ID NO: 11182 - RNA, 22 nt, Unknown
  Description of Unknown: Target viral genome RNA sequence
cuaguuuauuguuucuuaggcu

SEQ ID NO: 11183 - RNA, 22 nt, Unknown
  Description of Unknown: Target viral genome RNA sequence
uaguuuauuguuucuuaggcua

SEQ ID NO: 11184 - RNA, 22 nt, Unknown
  Description of Unknown: Target viral genome RNA sequence
aguuuauuguuucuuaggcuau

SEQ ID NO: 11185 - RNA, 22 nt, Unknown
  Description of Unknown: Target viral genome RNA sequence
guuuauuguuucuuaggcuauu

SEQ ID NO: 11186 - RNA, 22 nt, Unknown
  Description of Unknown: Target viral genome RNA sequence
uuuauuguuucuuaggcuauuu

SEQ ID NO: 11187 - RNA, 22 nt, Unknown
  Description of Unknown: Target viral genome RNA sequence
uuauuguuucuuaggcuauuuu

SEQ ID NO: 11188 - RNA, 22 nt, Unknown
  Description of Unknown: Target viral genome RNA sequence
uauuguuucuuaggcuauuuuu

SEQ ID NO: 11189 - RNA, 22 nt, Unknown
  Description of Unknown: Target viral genome RNA sequence
auuguuucuuaggcuauuuuug

SEQ ID NO: 11190 - RNA, 22 nt, Unknown
  Description of Unknown: Target viral genome RNA sequence
ugucgauucagaucuuaaugac

SEQ ID NO: 11191 - RNA, 22 nt, Unknown
  Description of Unknown: Target viral genome RNA sequence
ucugcuaaucuugcugcuacua

SEQ ID NO: 11192 - RNA, 22 nt, Unknown
  Description of Unknown: Target viral genome RNA sequence
gccccaagguuuacccaauaau

SEQ ID NO: 11193 - RNA, 22 nt, Unknown
  Description of Unknown: Target viral genome RNA sequence
ccccaagguuuacccaauaaua

SEQ ID NO: 11194 - RNA, 22 nt, Unknown
  Description of Unknown: Target viral genome RNA sequence
guuaaaccagguggaaccucau

SEQ ID NO: 11195 - RNA, 22 nt, Unknown
  Description of Unknown: Target viral genome RNA sequence
uuaaaccagguggaaccucauc

SEQ ID NO: 11196 - RNA, 22 nt, Unknown
  Description of Unknown: Target viral genome RNA sequence
uguuaaaccagguggaaccuca

SEQ ID NO: 11197 - RNA, 22 nt, Unknown
  Description of Unknown: Target viral genome RNA sequence
caagguuuacccaauaauacug

SEQ ID NO: 11198 - RNA, 22 nt, Unknown
  Description of Unknown: Target viral genome RNA sequence
aagguuuacccaauaauacugc

SEQ ID NO: 11199 - RNA, 22 nt, Unknown
  Description of Unknown: Target viral genome RNA sequence
aauuuuggugcaauuucaagug

SEQ ID NO: 11200 - RNA, 22 nt, Unknown
  Description of Unknown: Target viral genome RNA sequence
auuuuggugcaauuucaagugu

SEQ ID NO: 11201 - RNA, 22 nt, Unknown
  Description of Unknown: Target viral genome RNA sequence
ccaauuuuggugcaauuucaag

SEQ ID NO: 11202 - RNA, 22 nt, Unknown
  Description of Unknown: Target viral genome RNA sequence
caauuuuggugcaauuucaagu

SEQ ID NO: 11203 - RNA, 22 nt, Unknown
  Description of Unknown: Target viral genome RNA sequence
uuuuggugcaauuucaaguguu

SEQ ID NO: 11204-12000 - skipped (797 entries)

SEQ ID NO: 12001 - DNA, 22 bp, Artificial Sequence
  Description of Artificial Sequence: Synthetic oligonucleotide
tcctgagcaaagaagaagtgtt

SEQ ID NO: 12002 - DNA, 22 bp, Artificial Sequence
  Description of Artificial Sequence: Synthetic oligonucleotide
tgtctgatatcacacattgttg

SEQ ID NO: 12003 - DNA, 22 bp, Artificial Sequence
  Description of Artificial Sequence: Synthetic oligonucleotide
tctgatcccaatatttaaaata

SEQ ID NO: 12004 - DNA, 22 bp, Artificial Sequence
  Description of Artificial Sequence: Synthetic oligonucleotide
gtctcttaactacaaagtaaga

SEQ ID NO: 12005 - DNA, 22 bp, Artificial Sequence
  Description of Artificial Sequence: Synthetic oligonucleotide
ggcgtacacgttcacctaagtt

SEQ ID NO: 12006 - DNA, 22 bp, Artificial Sequence
  Description of Artificial Sequence: Synthetic oligonucleotide
gattcatttgagttatagtagg

SEQ ID NO: 12007 - DNA, 21 bp, Artificial Sequence
  Description of Artificial Sequence: Synthetic oligonucleotide
tacggtgcgagctctattctt

SEQ ID NO: 12008 - DNA, 22 bp, Artificial Sequence
  Description of Artificial Sequence: Synthetic oligonucleotide
gataatcccaacccataaggtg

SEQ ID NO: 12009 - DNA, 22 bp, Artificial Sequence
  Description of Artificial Sequence: Synthetic oligonucleotide
cttgagcacactcattagctaa

SEQ ID NO: 12010 - DNA, 22 bp, Artificial Sequence
  Description of Artificial Sequence: Synthetic oligonucleotide
tagcagggtcagcagcatacac

SEQ ID NO: 12011 - DNA, 22 bp, Artificial Sequence
  Description of Artificial Sequence: Synthetic oligonucleotide
aaacattaaagtttgcacaatg

SEQ ID NO: 12012 - DNA, 22 bp, Artificial Sequence
  Description of Artificial Sequence: Synthetic oligonucleotide
gacaacaattagtttttaggaa

SEQ ID NO: 12013 - DNA, 22 bp, Artificial Sequence
  Description of Artificial Sequence: Synthetic oligonucleotide
atatatgtggtaccatgtcacc

SEQ ID NO: 12014 - DNA, 22 bp, Artificial Sequence
  Description of Artificial Sequence: Synthetic oligonucleotide
attaccttcatcaaaatgcctt

SEQ ID NO: 12015 - DNA, 22 bp, Artificial Sequence
  Description of Artificial Sequence: Synthetic oligonucleotide
cttgattatctaatgtcagtac

SEQ ID NO: 12016 - DNA, 22 bp, Artificial Sequence
  Description of Artificial Sequence: Synthetic oligonucleotide
aagaatctacaacaggaactcc

SEQ ID NO: 12017 - DNA, 23 bp, Artificial Sequence
  Description of Artificial Sequence: Synthetic oligonucleotide
atcataagtgtaccatctgtttt

SEQ ID NO: 12018 - DNA, 22 bp, Artificial Sequence
  Description of Artificial Sequence: Synthetic oligonucleotide
agcaaaattcatgaggtccttt

SEQ ID NO: 12019 - DNA, 22 bp, Artificial Sequence
  Description of Artificial Sequence: Synthetic oligonucleotide
aacattttgcttcagacataaa

SEQ ID NO: 12020 - DNA, 22 bp, Artificial Sequence
  Description of Artificial Sequence: Synthetic oligonucleotide
cactattagcataagcagttgt

SEQ ID NO: 12021 - DNA, 22 bp, Artificial Sequence
  Description of Artificial Sequence: Synthetic oligonucleotide
tcttctttttgtcctttttagg

SEQ ID NO: 12022 - DNA, 22 bp, Artificial Sequence
  Description of Artificial Sequence: Synthetic oligonucleotide
gaatgttttgtatgcgtcaata

SEQ ID NO: 12023 - DNA, 22 bp, Artificial Sequence
  Description of Artificial Sequence: Synthetic oligonucleotide
tttggatctttgtcatccaatt

SEQ ID NO: 12024 - DNA, 22 bp, Artificial Sequence
  Description of Artificial Sequence: Synthetic oligonucleotide
ccacgttcccgaaggtgtgact

SEQ ID NO: 12025 - DNA, 22 bp, Artificial Sequence
  Description of Artificial Sequence: Synthetic oligonucleotide
aaattgtgcaatttgcggccaa

SEQ ID NO: 12026 - DNA, 22 bp, Artificial Sequence
  Description of Artificial Sequence: Synthetic oligonucleotide
aatcagttccttgtctgattag

SEQ ID NO: 12027 - DNA, 22 bp, Artificial Sequence
  Description of Artificial Sequence: Synthetic oligonucleotide
cttgggtttgttctggaccacg

SEQ ID NO: 12028 - DNA, 22 bp, Artificial Sequence
  Description of Artificial Sequence: Synthetic oligonucleotide
gtggcagtacgtttttgccgag

SEQ ID NO: 12029 - DNA, 22 bp, Artificial Sequence
  Description of Artificial Sequence: Synthetic oligonucleotide
gcctcagcagcagatttcttag

SEQ ID NO: 12030 - DNA, 22 bp, Artificial Sequence
  Description of Artificial Sequence: Synthetic oligonucleotide
gttgttgttggcctttaccaga

SEQ ID NO: 12031 - DNA, 22 bp, Artificial Sequence
  Description of Artificial Sequence: Synthetic oligonucleotide
gcctggagttgaatttcttgaa

SEQ ID NO: 12032 - DNA, 22 bp, Artificial Sequence
  Description of Artificial Sequence: Synthetic oligonucleotide
gaagaggcttgactgccgcctc

SEQ ID NO: 12033 - DNA, 22 bp, Artificial Sequence
  Description of Artificial Sequence: Synthetic oligonucleotide
ttttggcaatgttgttccttga

SEQ ID NO: 12034 - DNA, 22 bp, Artificial Sequence
  Description of Artificial Sequence: Synthetic oligonucleotide
aggattgcgggtgccaatgtga

SEQ ID NO: 12035 - DNA, 22 bp, Artificial Sequence
  Description of Artificial Sequence: Synthetic oligonucleotide
aggctccctcagttgcaaccca

SEQ ID NO: 12036 - DNA, 22 bp, Artificial Sequence
  Description of Artificial Sequence: Synthetic oligonucleotide
ggtagctcttcggtagtagcca

SEQ ID NO: 12037 - DNA, 22 bp, Artificial Sequence
  Description of Artificial Sequence: Synthetic oligonucleotide
aacgccttgtcctcgagggaat

SEQ ID NO: 12038 - DNA, 22 bp, Artificial Sequence
  Description of Artificial Sequence: Synthetic oligonucleotide
tgaaccaagacgcagtattatt

SEQ ID NO: 12039 - DNA, 22 bp, Artificial Sequence
  Description of Artificial Sequence: Synthetic oligonucleotide
ccccactgcgttctccattctg

SEQ ID NO: 12040 - DNA, 22 bp, Artificial Sequence
  Description of Artificial Sequence: Synthetic oligonucleotide
ttgaatctgagggtccaccaaa

SEQ ID NO: 12041-12100 - skipped (60 entries)

SEQ ID NO: 12101 - RNA, 22 nt, Artificial Sequence
  Description of Artificial Sequence: Synthetic oligonucleotide
uccugagcaaagaagaaguguu

SEQ ID NO: 12102 - RNA, 22 nt, Artificial Sequence
  Description of Artificial Sequence: Synthetic oligonucleotide
ugucugauaucacacauuguug

SEQ ID NO: 12103 - RNA, 22 nt, Artificial Sequence
  Description of Artificial Sequence: Synthetic oligonucleotide
ucugaucccaauauuuaaaaua

SEQ ID NO: 12104 - RNA, 22 nt, Artificial Sequence
  Description of Artificial Sequence: Synthetic oligonucleotide
gucucuuaacuacaaaguaaga

SEQ ID NO: 12105 - RNA, 22 nt, Artificial Sequence
  Description of Artificial Sequence: Synthetic oligonucleotide
ggcguacacguucaccuaaguu

SEQ ID NO: 12106 - RNA, 22 nt, Artificial Sequence
  Description of Artificial Sequence: Synthetic oligonucleotide
gauucauuugaguuauaguagg

SEQ ID NO: 12107 - RNA, 21 nt, Artificial Sequence
  Description of Artificial Sequence: Synthetic oligonucleotide
uacggugcgagcucuauucuu

SEQ ID NO: 12108 - RNA, 22 nt, Artificial Sequence
  Description of Artificial Sequence: Synthetic oligonucleotide
gauaaucccaacccauaaggug

SEQ ID NO: 12109 - RNA, 22 nt, Artificial Sequence
  Description of Artificial Sequence: Synthetic oligonucleotide
cuugagcacacucauuagcuaa

SEQ ID NO: 12110 - RNA, 22 nt, Artificial Sequence
  Description of Artificial Sequence: Synthetic oligonucleotide
uagcagggucagcagcauacac

SEQ ID NO: 12111 - RNA, 22 nt, Artificial Sequence
  Description of Artificial Sequence: Synthetic oligonucleotide
aaacauuaaaguuugcacaaug

SEQ ID NO: 12112 - RNA, 22 nt, Artificial Sequence
  Description of Artificial Sequence: Synthetic oligonucleotide
gacaacaauuaguuuuuaggaa

SEQ ID NO: 12113 - RNA, 22 nt, Artificial Sequence
  Description of Artificial Sequence: Synthetic oligonucleotide
auauaugugguaccaugucacc

SEQ ID NO: 12114 - RNA, 22 nt, Artificial Sequence
  Description of Artificial Sequence: Synthetic oligonucleotide
auuaccuucaucaaaaugccuu

SEQ ID NO: 12115 - RNA, 22 nt, Artificial Sequence
  Description of Artificial Sequence: Synthetic oligonucleotide
cuugauuaucuaaugucaguac

SEQ ID NO: 12116 - RNA, 22 nt, Artificial Sequence
  Description of Artificial Sequence: Synthetic oligonucleotide
aagaaucuacaacaggaacucc

SEQ ID NO: 12117 - RNA, 23 nt, Artificial Sequence
  Description of Artificial Sequence: Synthetic oligonucleotide
aucauaaguguaccaucuguuuu

SEQ ID NO: 12118 - RNA, 22 nt, Artificial Sequence
  Description of Artificial Sequence: Synthetic oligonucleotide
agcaaaauucaugagguccuuu

SEQ ID NO: 12119 - RNA, 22 nt, Artificial Sequence
  Description of Artificial Sequence: Synthetic oligonucleotide
aacauuuugcuucagacauaaa

SEQ ID NO: 12120 - RNA, 22 nt, Artificial Sequence
  Description of Artificial Sequence: Synthetic oligonucleotide
cacuauuagcauaagcaguugu

SEQ ID NO: 12121 - RNA, 22 nt, Artificial Sequence
  Description of Artificial Sequence: Synthetic oligonucleotide
ucuucuuuuuguccuuuuuagg

SEQ ID NO: 12122 - RNA, 22 nt, Artificial Sequence
  Description of Artificial Sequence: Synthetic oligonucleotide
gaauguuuuguaugcgucaaua

SEQ ID NO: 12123 - RNA, 22 nt, Artificial Sequence
  Description of Artificial Sequence: Synthetic oligonucleotide
uuuggaucuuugucauccaauu

SEQ ID NO: 12124 - RNA, 22 nt, Artificial Sequence
  Description of Artificial Sequence: Synthetic oligonucleotide
ccacguucccgaaggugugacu

SEQ ID NO: 12125 - RNA, 22 nt, Artificial Sequence
  Description of Artificial Sequence: Synthetic oligonucleotide
aaauugugcaauuugcggccaa

SEQ ID NO: 12126 - RNA, 22 nt, Artificial Sequence
  Description of Artificial Sequence: Synthetic oligonucleotide
aaucaguuccuugucugauuag

SEQ ID NO: 12127 - RNA, 22 nt, Artificial Sequence
  Description of Artificial Sequence: Synthetic oligonucleotide
cuuggguuuguucuggaccacg

SEQ ID NO: 12128 - RNA, 22 nt, Artificial Sequence
  Description of Artificial Sequence: Synthetic oligonucleotide
guggcaguacguuuuugccgag

SEQ ID NO: 12129 - RNA, 22 nt, Artificial Sequence
  Description of Artificial Sequence: Synthetic oligonucleotide
gccucagcagcagauuucuuag

SEQ ID NO: 12130 - RNA, 22 nt, Artificial Sequence
  Description of Artificial Sequence: Synthetic oligonucleotide
guuguuguuggccuuuaccaga

SEQ ID NO: 12131 - RNA, 22 nt, Artificial Sequence
  Description of Artificial Sequence: Synthetic oligonucleotide
gccuggaguugaauuucuugaa

SEQ ID NO: 12132 - RNA, 22 nt, Artificial Sequence
  Description of Artificial Sequence: Synthetic oligonucleotide
gaagaggcuugacugccgccuc

SEQ ID NO: 12133 - RNA, 22 nt, Artificial Sequence
  Description of Artificial Sequence: Synthetic oligonucleotide
uuuuggcaauguuguuccuuga

SEQ ID NO: 12134 - RNA, 22 nt, Artificial Sequence
  Description of Artificial Sequence: Synthetic oligonucleotide
aggauugcgggugccaauguga

SEQ ID NO: 12135 - RNA, 22 nt, Artificial Sequence
  Description of Artificial Sequence: Synthetic oligonucleotide
aggcucccucaguugcaaccca

SEQ ID NO: 12136 - RNA, 22 nt, Artificial Sequence
  Description of Artificial Sequence: Synthetic oligonucleotide
gguagcucuucgguaguagcca

SEQ ID NO: 12137 - RNA, 22 nt, Artificial Sequence
  Description of Artificial Sequence: Synthetic oligonucleotide
aacgccuuguccucgagggaau

SEQ ID NO: 12138 - RNA, 22 nt, Artificial Sequence
  Description of Artificial Sequence: Synthetic oligonucleotide
ugaaccaagacgcaguauuauu

SEQ ID NO: 12139 - RNA, 22 nt, Artificial Sequence
  Description of Artificial Sequence: Synthetic oligonucleotide
ccccacugcguucuccauucug

SEQ ID NO: 12140 - RNA, 22 nt, Artificial Sequence
  Description of Artificial Sequence: Synthetic oligonucleotide
uugaaucugaggguccaccaaa

SEQ ID NO: 12141-12200 - skipped (60 entries)

SEQ ID NO: 12201 - RNA, 22 nt, Unknown
  Description of Unknown: Target viral genome RNA sequence
aacacuucuucuuugcucagga

SEQ ID NO: 12202 - RNA, 22 nt, Unknown
  Description of Unknown: Target viral genome RNA sequence
caacaaugugugauaucagaca

SEQ ID NO: 12203 - RNA, 22 nt, Unknown
  Description of Unknown: Target viral genome RNA sequence
uauuuuaaauauugggaucaga

SEQ ID NO: 12204 - RNA, 22 nt, Unknown
  Description of Unknown: Target viral genome RNA sequence
ucuuacuuuguaguuaagagac

SEQ ID NO: 12205 - RNA, 22 nt, Unknown
  Description of Unknown: Target viral genome RNA sequence
aacuuaggugaacguguacgcc

SEQ ID NO: 12206 - RNA, 22 nt, Unknown
  Description of Unknown: Target viral genome RNA sequence
ccuacuauaacucaaaugaauc

SEQ ID NO: 12207 - RNA, 21 nt, Unknown
  Description of Unknown: Target viral genome RNA sequence
aagaauagagcucgcaccgua

SEQ ID NO: 12208 - RNA, 22 nt, Unknown
  Description of Unknown: Target viral genome RNA sequence
caccuuauggguugggauuauc

SEQ ID NO: 12209 - RNA, 22 nt, Unknown
  Description of Unknown: Target viral genome RNA sequence
uuagcuaaugagugugcucaag

SEQ ID NO: 12210 - RNA, 22 nt, Unknown
  Description of Unknown: Target viral genome RNA sequence
guguaugcugcugacccugcua

SEQ ID NO: 12211 - RNA, 22 nt, Unknown
  Description of Unknown: Target viral genome RNA sequence
cauugugcaaacuuuaauguuu

SEQ ID NO: 12212 - RNA, 22 nt, Unknown
  Description of Unknown: Target viral genome RNA sequence
uuccuaaaaacuaauuguuguc

SEQ ID NO: 12213 - RNA, 22 nt, Unknown
  Description of Unknown: Target viral genome RNA sequence
ggugacaugguaccacauauau

SEQ ID NO: 12214 - RNA, 22 nt, Unknown
  Description of Unknown: Target viral genome RNA sequence
aaggcauuuugaugaagguaau

SEQ ID NO: 12215 - RNA, 22 nt, Unknown
  Description of Unknown: Target viral genome RNA sequence
guacugacauuagauaaucaag

SEQ ID NO: 12216 - RNA, 22 nt, Unknown
  Description of Unknown: Target viral genome RNA sequence
ggaguuccuguuguagauucuu

SEQ ID NO: 12217 - RNA, 23 nt, Unknown
  Description of Unknown: Target viral genome RNA sequence
aaaacagaugguacacuuaugau

SEQ ID NO: 12218 - RNA, 22 nt, Unknown
  Description of Unknown: Target viral genome RNA sequence
aaaggaccucaugaauuuugcu

SEQ ID NO: 12219 - RNA, 22 nt, Unknown
  Description of Unknown: Target viral genome RNA sequence
uuuaugucugaagcaaaauguu

SEQ ID NO: 12220 - RNA, 22 nt, Unknown
  Description of Unknown: Target viral genome RNA sequence
acaacugcuuaugcuaauagug

SEQ ID NO: 12221 - RNA, 22 nt, Unknown
  Description of Unknown: Target viral genome RNA sequence
ccuaaaaaggacaaaaagaaga

SEQ ID NO: 12222 - RNA, 22 nt, Unknown
  Description of Unknown: Target viral genome RNA sequence
uauugacgcauacaaaacauuc

SEQ ID NO: 12223 - RNA, 22 nt, Unknown
  Description of Unknown: Target viral genome RNA sequence
aauuggaugacaaagauccaaa

SEQ ID NO: 12224 - RNA, 22 nt, Unknown
  Description of Unknown: Target viral genome RNA sequence
agucacaccuucgggaacgugg

SEQ ID NO: 12225 - RNA, 22 nt, Unknown
  Description of Unknown: Target viral genome RNA sequence
uuggccgcaaauugcacaauuu

SEQ ID NO: 12226 - RNA, 22 nt, Unknown
  Description of Unknown: Target viral genome RNA sequence
cuaaucagacaaggaacugauu

SEQ ID NO: 12227 - RNA, 22 nt, Unknown
  Description of Unknown: Target viral genome RNA sequence
cgugguccagaacaaacccaag

SEQ ID NO: 12228 - RNA, 22 nt, Unknown
  Description of Unknown: Target viral genome RNA sequence
cucggcaaaaacguacugccac

SEQ ID NO: 12229 - RNA, 22 nt, Unknown
  Description of Unknown: Target viral genome RNA sequence
cuaagaaaucugcugcugaggc

SEQ ID NO: 12230 - RNA, 22 nt, Unknown
  Description of Unknown: Target viral genome RNA sequence
ucugguaaaggccaacaacaac

SEQ ID NO: 12231 - RNA, 22 nt, Unknown
  Description of Unknown: Target viral genome RNA sequence
uucaagaaauucaacuccaggc

SEQ ID NO: 12232 - RNA, 22 nt, Unknown
  Description of Unknown: Target viral genome RNA sequence
gaggcggcagucaagccucuuc

SEQ ID NO: 12233 - RNA, 22 nt, Unknown
  Description of Unknown: Target viral genome RNA sequence
ucaaggaacaacauugccaaaa

SEQ ID NO: 12234 - RNA, 22 nt, Unknown
  Description of Unknown: Target viral genome RNA sequence
ucacauuggcacccgcaauccu

SEQ ID NO: 12235 - RNA, 22 nt, Unknown
  Description of Unknown: Target viral genome RNA sequence
uggguugcaacugagggagccu

SEQ ID NO: 12236 - RNA, 22 nt, Unknown
  Description of Unknown: Target viral genome RNA sequence
uggcuacuaccgaagagcuacc

SEQ ID NO: 12237 - RNA, 22 nt, Unknown
  Description of Unknown: Target viral genome RNA sequence
auucccucgaggacaaggcguu

SEQ ID NO: 12238 - RNA, 22 nt, Unknown
  Description of Unknown: Target viral genome RNA sequence
aauaauacugcgucuugguuca

SEQ ID NO: 12239 - RNA, 22 nt, Unknown
  Description of Unknown: Target viral genome RNA sequence
cagaauggagaacgcagugggg

SEQ ID NO: 12240 - RNA, 22 nt, Unknown
  Description of Unknown: Target viral genome RNA sequence
uuugguggacccucagauucaa

SEQ ID NO: 12241-12250 - skipped (10 entries)

SEQ ID NO: 12251 - DNA, 2000 bp, Artificial Sequence
  Description of Artificial Sequence: Synthetic polynucleotide
cttcagtcagctgatgcacaatcgtttttaaacgggtttgcggtgtaagtgcagcccgtcttacaccgtgcggcacaggcactagtactgatgtcgtatacagggcttttgacatctacaatgataaagtagctggttttgctaaattcctaaaaactaattgttgtcgcttccaagaaaaggacgaagatgacaatttaattgattcttactttgtagttaagagacacactttctctaactaccaacatgaagaaacaatttataatttacttaaggattgtccagctgttgctaaacatgacttctttaagtttagaatagacggtgacatggtaccacatatatcacgtcaacgtcttactaaatacacaatggcagacctcgtctatgctttaaggcattttgatgaaggtaattgtgacacattaaaagaaatacttgtcacatacaattgttgtgatgatgattatttcaataaaaaggactggtatgattttgtagaaaacccagatatattacgcgtatacgccaacttaggtgaacgtgtacgccaagctttgttaaaaacagtacaattctgtgatgccatgcgaaatgctggtattgttggtgtactgacattagataatcaagatctcaatggtaactggtatgatttcggtgatttcatacaaaccacgccaggtagtggagttcctgttgtagattcttattattcattgttaatgcctatattaaccttgaccagggctttaactgcagagtcacatgttgacactgacttaacaaagccttacattaagtgggatttgttaaaatatgacttcacggaagagaggttaaaactctttgaccgttattttaaatattgggatcagacataccacccaaattgtgttaactgtttggatgacagatgcattctgcattgtgcaaactttaatgttttattctctacagtgttcccacctacaagttttggaccactagtgagaaaaatatttgttgatggtgttccatttgtagtttcaactggataccacttcagagagctaggtgttgtacataatcaggatgtaaacttacatagctctagacttagttttaaggaattacttgtgtatgctgctgaccctgctatgcacgctgcttctggtaatctattactagataaacgcactacgtgcttttcagtagctgcacttactaacaatgttgcttttcaaactgtcaaacccggtaattttaacaaagacttctatgactttgctgtgtctaagggtttctttaaggaaggaagttctgttgaattaaaacacttcttctttgctcaggatggtaatgctgctatcagcgattatgactactatcgttataatctaccaacaatgtgtgatatcagacaactactatttgtagttgaagttgttgataagtactttgattgttacgatggtggctgtattaatgctaaccaagtcatcgtcaacaacctagacaaatcagctggttttccatttaataaatggggtaaggctagactttattatgattcaatgagttatgaggatcaagatgcacttttcgcatatacaaaacgtaatgtcatccctactataactcaaatgaatcttaagtatgccattagtgcaaagaatagagctcgcaccgtagctggtgtctctatctgtagtactatgaccaatagacagtttcatcaaaaattattgaaatcaatagccgccactagaggagctactgtagtaattggaacaagcaaattctatggtggttggcacaacatgttaaaaactgtttatagtgatgtagaaaaccctcaccttatgggttgggattatcctaaatgtgatagagccatgcctaacatgcttagaattatggcctcacttgttcttgctcgcaaacatacaacgtgttgtagcttgtcacaccgtttctatagattagctaatgagtgtgctcaagtattgagtgaa

SEQ ID NO: 12252 - DNA, 2023 bp, Artificial Sequence
  Description of Artificial Sequence: Synthetic polynucleotide
atggtcatgtgtggcggttcactatatgttaaaccaggtggaacctcatcaggagatgccacaactgcttatgctaatagtgtttttaacatttgtcaagctgtcacggccaatgttaatgcacttttatctactgatggtaacaaaattgccgataagtatgtccgcaatttacaacacagactttatgagtgtctctatagaaatagagatgttgacacagactttgtgaatgagttttacgcatatttgcgtaaacatttctcaatgatgatactctctgacgatgctgttgtgtgtttcaatagcacttatgcatctcaaggtctagtggctagcataaagaactttaagtcagttctttattatcaaaacaatgtttttatgtctgaagcaaaatgttggactgagactgaccttactaaaggacctcatgaattttgctctcaacatacaatgctagttaaacagggtgatgattatgtgtaccttccttacccagatccatcaagaatcctaggggccggctgttttgtagatgatatcgtaaaaacagatggtacacttatgattgaacggttcgtgtctttagctatagatgcttacccacttactaaacatcctaatcaggagtatgctgatgtctttcatttgtacttacaatacataagaaagctacatgatgagttaacaggacacatgttagacatgtattctgttatgcttactaatgataacacttcaaggtattgggaacctgagttttatgtctgataatggaccccaaaatcagcgaaatgcaccccgcattacgtttggtggaccctcagattcaactggcagtaaccagaatggagaacgcagtggggcgcgatcaaaacaacgtcggccccaaggtttacccaataatactgcgtcttggttcaccgctctcactcaacatggcaaggaagaccttaaattccctcgaggacaaggcgttccaattaacaccaatagcagtccagatgaccaaattggctactaccgaagagctaccagacgaattcgtggtggtgacggtaaaatgaaagatctcagtccaagatggtatttctactacctaggaactgggccagaagctggacttccctatggtgctaacaaagacggcatcatatgggttgcaactgagggagccttgaatacaccaaaagatcacattggcacccgcaatcctgctaacaatgctgcaatcgtgctacaacttcctcaaggaacaacattgccaaaaggcttctacgcagaagggagcagaggcggcagtcaagcctcttctcgttcctcatcacgtagtcgcaacagttcaagaaattcaactccaggcagcagtaggggaacttctcctgctagaatggctggcaatggcggtgatgctgctcttgctttgctgctgcttgacagattgaaccagcttgagagcaaaatgtctggtaaaggccaacaacaacaaggccaaactgtcactaagaaatctgctgctgaggcttctaagaagcctcggcaaaaacgtactgccactaaagcatacaatgtaacacaagctttcggcagacgtggtccagaacaaacccaaggaaattttggggaccaggaactaatcagacaaggaactgattacaaacattggccgcaaattgcacaatttgcccccagcgcttcagcgttcttcggaatgtcgcgcattggcatggaagtcacaccttcgggaacgtggttgacctacacaggtgccatcaaattggatgacaaagatccaaatttcaaagatcaagtcattttgctgaataagcatattgacgcatacaaaacattcccaccaacagagcctaaaaaggacaaaaagaagaaggctgatgaaactcaagccttaccgcagagacagaagaaacagcaaactgtgactcttcttcctgctgcagatttggatgatttctccaaacaattgcaacaatccatgagcagtgctgactcaactcaggcc

SEQ ID NO: 12253-12300 - skipped (48 entries)

SEQ ID NO: 12301 - RNA, 22 nt, Artificial Sequence
  Description of Artificial Sequence: Synthetic oligonucleotide
uaaaaacgaccuuguuucuacu

SEQ ID NO: 12302 - RNA, 22 nt, Artificial Sequence
  Description of Artificial Sequence: Synthetic oligonucleotide
gaauucggauggccaucaauua

SEQ ID NO: 12303 - RNA, 22 nt, Artificial Sequence
  Description of Artificial Sequence: Synthetic oligonucleotide
gacagccagacagcgaccaaaa

SEQ ID NO: 12304 - RNA, 22 nt, Artificial Sequence
  Description of Artificial Sequence: Synthetic oligonucleotide
agcgaaagcaggucaauuauau

SEQ ID NO: 12305 - RNA, 22 nt, Artificial Sequence
  Description of Artificial Sequence: Synthetic oligonucleotide
uauggaaagaauaaaagaacua

SEQ ID NO: 12306 - RNA, 22 nt, Artificial Sequence
  Description of Artificial Sequence: Synthetic oligonucleotide
augucgcagucucgcacucgcg

SEQ ID NO: 12307 - RNA, 22 nt, Artificial Sequence
  Description of Artificial Sequence: Synthetic oligonucleotide
gaaaaaaugccuuguuucuacu

SEQ ID NO: 12308 - RNA, 22 nt, Artificial Sequence
  Description of Artificial Sequence: Synthetic oligonucleotide
gugaauuuagcuuguccuucau

SEQ ID NO: 12309 - RNA, 22 nt, Artificial Sequence
  Description of Artificial Sequence: Synthetic oligonucleotide
agaucuguuccaccauugaaga

SEQ ID NO: 12310 - RNA, 22 nt, Artificial Sequence
  Description of Artificial Sequence: Synthetic oligonucleotide
agcgaaagcaggcaaaccauuu

SEQ ID NO: 12311 - RNA, 22 nt, Artificial Sequence
  Description of Artificial Sequence: Synthetic oligonucleotide
uugaauggaugucaauccgacu

SEQ ID NO: 12312 - RNA, 22 nt, Artificial Sequence
  Description of Artificial Sequence: Synthetic oligonucleotide
ucccuuauacuggagacccucc

SEQ ID NO: 12313 - RNA, 22 nt, Artificial Sequence
  Description of Artificial Sequence: Synthetic oligonucleotide
aaaaaaguaccuuguuucuacu

SEQ ID NO: 12314 - RNA, 22 nt, Artificial Sequence
  Description of Artificial Sequence: Synthetic oligonucleotide
cuauuugcuauccauacugucc

SEQ ID NO: 12315 - RNA, 22 nt, Artificial Sequence
  Description of Artificial Sequence: Synthetic oligonucleotide
uuaaugaucccuggguuuugcu

SEQ ID NO: 12316 - RNA, 22 nt, Artificial Sequence
  Description of Artificial Sequence: Synthetic oligonucleotide
agcgaaagcagguacugaucca

SEQ ID NO: 12317 - RNA, 22 nt, Artificial Sequence
  Description of Artificial Sequence: Synthetic oligonucleotide
auuuugugcgacaaugcuucaa

SEQ ID NO: 12318 - RNA, 22 nt, Artificial Sequence
  Description of Artificial Sequence: Synthetic oligonucleotide
caaugaaagaguauggggagga

SEQ ID NO: 12319 - RNA, 22 nt, Artificial Sequence
  Description of Artificial Sequence: Synthetic oligonucleotide
gaaaaacacccuuguuucuacu

SEQ ID NO: 12320 - RNA, 22 nt, Artificial Sequence
  Description of Artificial Sequence: Synthetic oligonucleotide
ucuggaugugcucuaauggguc

SEQ ID NO: 12321 - RNA, 22 nt, Artificial Sequence
  Description of Artificial Sequence: Synthetic oligonucleotide
uagucucccugggggcaaucag

SEQ ID NO: 12322 - RNA, 22 nt, Artificial Sequence
  Description of Artificial Sequence: Synthetic oligonucleotide
agcaaaagcaggggaaaaacaa

SEQ ID NO: 12323 - RNA, 22 nt, Artificial Sequence
  Description of Artificial Sequence: Synthetic oligonucleotide
augcagacacauuauguauagg

SEQ ID NO: 12324 - RNA, 22 nt, Artificial Sequence
  Description of Artificial Sequence: Synthetic oligonucleotide
acacaguacuagaaaagaaugu

SEQ ID NO: 12325 - RNA, 22 nt, Artificial Sequence
  Description of Artificial Sequence: Synthetic oligonucleotide
gaaaaauacccuuguuucuacu

SEQ ID NO: 12326 - RNA, 22 nt, Artificial Sequence
  Description of Artificial Sequence: Synthetic oligonucleotide
auuucuucggagacaaugcaga

SEQ ID NO: 12327 - RNA, 22 nt, Artificial Sequence
  Description of Artificial Sequence: Synthetic oligonucleotide
gacaugaguaaugaaggaucuu

SEQ ID NO: 12328 - RNA, 22 nt, Artificial Sequence
  Description of Artificial Sequence: Synthetic oligonucleotide
agcaaaagcaggguagauaauc

SEQ ID NO: 12329 - RNA, 22 nt, Artificial Sequence
  Description of Artificial Sequence: Synthetic oligonucleotide
uggcgucucaaggcaccaaacg

SEQ ID NO: 12330 - RNA, 22 nt, Artificial Sequence
  Description of Artificial Sequence: Synthetic oligonucleotide
gaacagauggagacugauggag

SEQ ID NO: 12331 - RNA, 22 nt, Artificial Sequence
  Description of Artificial Sequence: Synthetic oligonucleotide
aaaaaaacuccuuguuucuacu

SEQ ID NO: 12332 - RNA, 22 nt, Artificial Sequence
  Description of Artificial Sequence: Synthetic oligonucleotide
gaacaggcucauggccugaugg

SEQ ID NO: 12333 - RNA, 22 nt, Artificial Sequence
  Description of Artificial Sequence: Synthetic oligonucleotide
acaguauuguuguguuuugugg

SEQ ID NO: 12334 - RNA, 22 nt, Artificial Sequence
  Description of Artificial Sequence: Synthetic oligonucleotide
agcaaaagcaggaguaaagaug

SEQ ID NO: 12335 - RNA, 22 nt, Artificial Sequence
  Description of Artificial Sequence: Synthetic oligonucleotide
auccaaaucaaaagauaauaac

SEQ ID NO: 12336 - RNA, 22 nt, Artificial Sequence
  Description of Artificial Sequence: Synthetic oligonucleotide
uggcucuguuucucucaccauu

SEQ ID NO: 12337 - RNA, 22 nt, Artificial Sequence
  Description of Artificial Sequence: Synthetic oligonucleotide
aaaaaacuaccuuguuucuacu

SEQ ID NO: 12338 - RNA, 22 nt, Artificial Sequence
  Description of Artificial Sequence: Synthetic oligonucleotide
gaacagcagagugcuguggaug

SEQ ID NO: 12339 - RNA, 22 nt, Artificial Sequence
  Description of Artificial Sequence: Synthetic oligonucleotide
gagucuaugagggaagaauauc

SEQ ID NO: 12340 - RNA, 22 nt, Artificial Sequence
  Description of Artificial Sequence: Synthetic oligonucleotide
agcaaaagcagguagauauuga

SEQ ID NO: 12341 - RNA, 22 nt, Artificial Sequence
  Description of Artificial Sequence: Synthetic oligonucleotide
uucuaaccgaggucgaaacgua

SEQ ID NO: 12342 - RNA, 22 nt, Artificial Sequence
  Description of Artificial Sequence: Synthetic oligonucleotide
ucaggcccccucaaagccgaga

SEQ ID NO: 12343 - RNA, 22 nt, Artificial Sequence
  Description of Artificial Sequence: Synthetic oligonucleotide
aaaaaacacccuuguuucuacu

SEQ ID NO: 12344 - RNA, 22 nt, Artificial Sequence
  Description of Artificial Sequence: Synthetic oligonucleotide
cuuucucguuucagcuuauuua

SEQ ID NO: 12345 - RNA, 22 nt, Artificial Sequence
  Description of Artificial Sequence: Synthetic oligonucleotide
gaaguggagcaagagauaagaa

SEQ ID NO: 12346 - RNA, 22 nt, Artificial Sequence
  Description of Artificial Sequence: Synthetic oligonucleotide
agcaaaagcagggugacaaaaa

SEQ ID NO: 12347 - RNA, 22 nt, Artificial Sequence
  Description of Artificial Sequence: Synthetic oligonucleotide
agguagauugcuuucuuuggca

SEQ ID NO: 12348 - RNA, 22 nt, Artificial Sequence
  Description of Artificial Sequence: Synthetic oligonucleotide
gugaugccccauuccuugaucg

SEQ ID NO: 12349 - DNA, 22 bp, Artificial Sequence
  Description of Artificial Sequence: Synthetic oligonucleotide
gtaactactcgagacgcctatt

SEQ ID NO: 12350 - DNA, 22 bp, Artificial Sequence
  Description of Artificial Sequence: Synthetic oligonucleotide
cttcgggatgcgtacaacgccg

SEQ ID NO: 12351 - DNA, 22 bp, Artificial Sequence
  Description of Artificial Sequence: Synthetic oligonucleotide
acataggtaggtctacgaacca

SEQ ID NO: 12352 - DNA, 22 bp, Artificial Sequence
  Description of Artificial Sequence: Synthetic oligonucleotide
cttagctgtacggctgactctg

SEQ ID NO: 12353 - DNA, 22 bp, Artificial Sequence
  Description of Artificial Sequence: Synthetic oligonucleotide
tgtgggatagcgcgaaagtgtg

SEQ ID NO: 12354 - DNA, 22 bp, Artificial Sequence
  Description of Artificial Sequence: Synthetic oligonucleotide
gaactcgtatccgatgataaga

SEQ ID NO: 12355-12400 - skipped (46 entries)

SEQ ID NO: 12401 - DNA, 22 bp, Artificial Sequence
  Description of Artificial Sequence: Synthetic oligonucleotide
taaaaacgaccttgtttctact

SEQ ID NO: 12402 - DNA, 22 bp, Artificial Sequence
  Description of Artificial Sequence: Synthetic oligonucleotide
gaattcggatggccatcaatta

SEQ ID NO: 12403 - DNA, 22 bp, Artificial Sequence
  Description of Artificial Sequence: Synthetic oligonucleotide
gacagccagacagcgaccaaaa

SEQ ID NO: 12404 - DNA, 22 bp, Artificial Sequence
  Description of Artificial Sequence: Synthetic oligonucleotide
agcgaaagcaggtcaattatat

SEQ ID NO: 12405 - DNA, 22 bp, Artificial Sequence
  Description of Artificial Sequence: Synthetic oligonucleotide
tatggaaagaataaaagaacta

SEQ ID NO: 12406 - DNA, 22 bp, Artificial Sequence
  Description of Artificial Sequence: Synthetic oligonucleotide
atgtcgcagtctcgcactcgcg

SEQ ID NO: 12407 - DNA, 22 bp, Artificial Sequence
  Description of Artificial Sequence: Synthetic oligonucleotide
gaaaaaatgccttgtttctact

SEQ ID NO: 12408 - DNA, 22 bp, Artificial Sequence
  Description of Artificial Sequence: Synthetic oligonucleotide
gtgaatttagcttgtccttcat

SEQ ID NO: 12409 - DNA, 22 bp, Artificial Sequence
  Description of Artificial Sequence: Synthetic oligonucleotide
agatctgttccaccattgaaga

SEQ ID NO: 12410 - DNA, 22 bp, Artificial Sequence
  Description of Artificial Sequence: Synthetic oligonucleotide
agcgaaagcaggcaaaccattt

SEQ ID NO: 12411 - DNA, 22 bp, Artificial Sequence
  Description of Artificial Sequence: Synthetic oligonucleotide
ttgaatggatgtcaatccgact

SEQ ID NO: 12412 - DNA, 22 bp, Artificial Sequence
  Description of Artificial Sequence: Synthetic oligonucleotide
tcccttatactggagaccctcc

SEQ ID NO: 12413 - DNA, 22 bp, Artificial Sequence
  Description of Artificial Sequence: Synthetic oligonucleotide
aaaaaagtaccttgtttctact

SEQ ID NO: 12414 - DNA, 22 bp, Artificial Sequence
  Description of Artificial Sequence: Synthetic oligonucleotide
ctatttgctatccatactgtcc

SEQ ID NO: 12415 - DNA, 22 bp, Artificial Sequence
  Description of Artificial Sequence: Synthetic oligonucleotide
ttaatgatccctgggttttgct

SEQ ID NO: 12416 - DNA, 22 bp, Artificial Sequence
  Description of Artificial Sequence: Synthetic oligonucleotide
agcgaaagcaggtactgatcca

SEQ ID NO: 12417 - DNA, 22 bp, Artificial Sequence
  Description of Artificial Sequence: Synthetic oligonucleotide
attttgtgcgacaatgcttcaa

SEQ ID NO: 12418 - DNA, 22 bp, Artificial Sequence
  Description of Artificial Sequence: Synthetic oligonucleotide
caatgaaagagtatggggagga

SEQ ID NO: 12419 - DNA, 22 bp, Artificial Sequence
  Description of Artificial Sequence: Synthetic oligonucleotide
gaaaaacacccttgtttctact

SEQ ID NO: 12420 - DNA, 22 bp, Artificial Sequence
  Description of Artificial Sequence: Synthetic oligonucleotide
tctggatgtgctctaatgggtc

SEQ ID NO: 12421 - DNA, 22 bp, Artificial Sequence
  Description of Artificial Sequence: Synthetic oligonucleotide
tagtctccctgggggcaatcag

SEQ ID NO: 12422 - DNA, 22 bp, Artificial Sequence
  Description of Artificial Sequence: Synthetic oligonucleotide
agcaaaagcaggggaaaaacaa

SEQ ID NO: 12423 - DNA, 22 bp, Artificial Sequence
  Description of Artificial Sequence: Synthetic oligonucleotide
atgcagacacattatgtatagg

SEQ ID NO: 12424 - DNA, 22 bp, Artificial Sequence
  Description of Artificial Sequence: Synthetic oligonucleotide
acacagtactagaaaagaatgt

SEQ ID NO: 12425 - DNA, 22 bp, Artificial Sequence
  Description of Artificial Sequence: Synthetic oligonucleotide
gaaaaatacccttgtttctact

SEQ ID NO: 12426 - DNA, 22 bp, Artificial Sequence
  Description of Artificial Sequence: Synthetic oligonucleotide
atttcttcggagacaatgcaga

SEQ ID NO: 12427 - DNA, 22 bp, Artificial Sequence
  Description of Artificial Sequence: Synthetic oligonucleotide
gacatgagtaatgaaggatctt

SEQ ID NO: 12428 - DNA, 22 bp, Artificial Sequence
  Description of Artificial Sequence: Synthetic oligonucleotide
agcaaaagcagggtagataatc

SEQ ID NO: 12429 - DNA, 22 bp, Artificial Sequence
  Description of Artificial Sequence: Synthetic oligonucleotide
tggcgtctcaaggcaccaaacg

SEQ ID NO: 12430 - DNA, 22 bp, Artificial Sequence
  Description of Artificial Sequence: Synthetic oligonucleotide
gaacagatggagactgatggag

SEQ ID NO: 12431 - DNA, 22 bp, Artificial Sequence
  Description of Artificial Sequence: Synthetic oligonucleotide
aaaaaaactccttgtttctact

SEQ ID NO: 12432 - DNA, 22 bp, Artificial Sequence
  Description of Artificial Sequence: Synthetic oligonucleotide
gaacaggctcatggcctgatgg

SEQ ID NO: 12433 - DNA, 22 bp, Artificial Sequence
  Description of Artificial Sequence: Synthetic oligonucleotide
acagtattgttgtgttttgtgg

SEQ ID NO: 12434 - DNA, 22 bp, Artificial Sequence
  Description of Artificial Sequence: Synthetic oligonucleotide
agcaaaagcaggagtaaagatg

SEQ ID NO: 12435 - DNA, 22 bp, Artificial Sequence
  Description of Artificial Sequence: Synthetic oligonucleotide
atccaaatcaaaagataataac

SEQ ID NO: 12436 - DNA, 22 bp, Artificial Sequence
  Description of Artificial Sequence: Synthetic oligonucleotide
tggctctgtttctctcaccatt

SEQ ID NO: 12437 - DNA, 22 bp, Artificial Sequence
  Description of Artificial Sequence: Synthetic oligonucleotide
aaaaaactaccttgtttctact

SEQ ID NO: 12438 - DNA, 22 bp, Artificial Sequence
  Description of Artificial Sequence: Synthetic oligonucleotide
gaacagcagagtgctgtggatg

SEQ ID NO: 12439 - DNA, 22 bp, Artificial Sequence
  Description of Artificial Sequence: Synthetic oligonucleotide
gagtctatgagggaagaatatc

SEQ ID NO: 12440 - DNA, 22 bp, Artificial Sequence
  Description of Artificial Sequence: Synthetic oligonucleotide
agcaaaagcaggtagatattga

SEQ ID NO: 12441 - DNA, 22 bp, Artificial Sequence
  Description of Artificial Sequence: Synthetic oligonucleotide
ttctaaccgaggtcgaaacgta

SEQ ID NO: 12442 - DNA, 22 bp, Artificial Sequence
  Description of Artificial Sequence: Synthetic oligonucleotide
tcaggccccctcaaagccgaga

SEQ ID NO: 12443 - DNA, 22 bp, Artificial Sequence
  Description of Artificial Sequence: Synthetic oligonucleotide
aaaaaacacccttgtttctact

SEQ ID NO: 12444 - DNA, 22 bp, Artificial Sequence
  Description of Artificial Sequence: Synthetic oligonucleotide
ctttctcgtttcagcttattta

SEQ ID NO: 12445 - DNA, 22 bp, Artificial Sequence
  Description of Artificial Sequence: Synthetic oligonucleotide
gaagtggagcaagagataagaa

SEQ ID NO: 12446 - DNA, 22 bp, Artificial Sequence
  Description of Artificial Sequence: Synthetic oligonucleotide
agcaaaagcagggtgacaaaaa

SEQ ID NO: 12447 - DNA, 22 bp, Artificial Sequence
  Description of Artificial Sequence: Synthetic oligonucleotide
aggtagattgctttctttggca

SEQ ID NO: 12448 - DNA, 22 bp, Artificial Sequence
  Description of Artificial Sequence: Synthetic oligonucleotide
gtgatgccccattccttgatcg

SEQ ID NO: 12449-12500 - skipped (52 entries)

SEQ ID NO: 12501 - RNA, 22 nt, Unknown
  Description of Unknown: Influenza genomic target sequence
aguagaaacaaggucguuuuua

SEQ ID NO: 12502 - RNA, 22 nt, Unknown
  Description of Unknown: Influenza genomic target sequence
uaauugauggccauccgaauuc

SEQ ID NO: 12503 - RNA, 22 nt, Unknown
  Description of Unknown: Influenza genomic target sequence
uuuuggucgcugucuggcuguc

SEQ ID NO: 12504 - RNA, 22 nt, Unknown
  Description of Unknown: Influenza genomic target sequence
auauaauugaccugcuuucgcu

SEQ ID NO: 12505 - RNA, 22 nt, Unknown
  Description of Unknown: Influenza genomic target sequence
uaguucuuuuauucuuuccaua

SEQ ID NO: 12506 - RNA, 22 nt, Unknown
  Description of Unknown: Influenza genomic target sequence
cgcgagugcgagacugcgacau

SEQ ID NO: 12507 - RNA, 22 nt, Unknown
  Description of Unknown: Influenza genomic target sequence
aguagaaacaaggcauuuuuuc

SEQ ID NO: 12508 - RNA, 22 nt, Unknown
  Description of Unknown: Influenza genomic target sequence
augaaggacaagcuaaauucac

SEQ ID NO: 12509 - RNA, 22 nt, Unknown
  Description of Unknown: Influenza genomic target sequence
ucuucaaugguggaacagaucu

SEQ ID NO: 12510 - RNA, 22 nt, Unknown
  Description of Unknown: Influenza genomic target sequence
aaaugguuugccugcuuucgcu

SEQ ID NO: 12511 - RNA, 22 nt, Unknown
  Description of Unknown: Influenza genomic target sequence
agucggauugacauccauucaa

SEQ ID NO: 12512 - RNA, 22 nt, Unknown
  Description of Unknown: Influenza genomic target sequence
ggagggucuccaguauaaggga

SEQ ID NO: 12513 - RNA, 22 nt, Unknown
  Description of Unknown: Influenza genomic target sequence
aguagaaacaagguacuuuuuu

SEQ ID NO: 12514 - RNA, 22 nt, Unknown
  Description of Unknown: Influenza genomic target sequence
ggacaguauggauagcaaauag

SEQ ID NO: 12515 - RNA, 22 nt, Unknown
  Description of Unknown: Influenza genomic target sequence
agcaaaacccagggaucauuaa

SEQ ID NO: 12516 - RNA, 22 nt, Unknown
  Description of Unknown: Influenza genomic target sequence
uggaucaguaccugcuuucgcu

SEQ ID NO: 12517 - RNA, 22 nt, Unknown
  Description of Unknown: Influenza genomic target sequence
uugaagcauugucgcacaaaau

SEQ ID NO: 12518 - RNA, 22 nt, Unknown
  Description of Unknown: Influenza genomic target sequence
uccuccccauacucuuucauug

SEQ ID NO: 12519 - RNA, 22 nt, Unknown
  Description of Unknown: Influenza genomic target sequence
aguagaaacaaggguguuuuuc

SEQ ID NO: 12520 - RNA, 22 nt, Unknown
  Description of Unknown: Influenza genomic target sequence
gacccauuagagcacauccaga

SEQ ID NO: 12521 - RNA, 22 nt, Unknown
  Description of Unknown: Influenza genomic target sequence
cugauugcccccagggagacua

SEQ ID NO: 12522 - RNA, 22 nt, Unknown
  Description of Unknown: Influenza genomic target sequence
uuguuuuuccccugcuuuugcu

SEQ ID NO: 12523 - RNA, 22 nt, Unknown
  Description of Unknown: Influenza genomic target sequence
ccuauacauaaugugucugcau

SEQ ID NO: 12524 - RNA, 22 nt, Unknown
  Description of Unknown: Influenza genomic target sequence
acauucuuuucuaguacugugu

SEQ ID NO: 12525 - RNA, 22 nt, Unknown
  Description of Unknown: Influenza genomic target sequence
aguagaaacaaggguauuuuuc

SEQ ID NO: 12526 - RNA, 22 nt, Unknown
  Description of Unknown: Influenza genomic target sequence
ucugcauugucuccgaagaaau

SEQ ID NO: 12527 - RNA, 22 nt, Unknown
  Description of Unknown: Influenza genomic target sequence
aagauccuucauuacucauguc

SEQ ID NO: 12528 - RNA, 22 nt, Unknown
  Description of Unknown: Influenza genomic target sequence
gauuaucuacccugcuuuugcu

SEQ ID NO: 12529 - RNA, 22 nt, Unknown
  Description of Unknown: Influenza genomic target sequence
cguuuggugccuugagacgcca

SEQ ID NO: 12530 - RNA, 22 nt, Unknown
  Description of Unknown: Influenza genomic target sequence
cuccaucagucuccaucuguuc

SEQ ID NO: 12531 - RNA, 22 nt, Unknown
  Description of Unknown: Influenza genomic target sequence
aguagaaacaaggaguuuuuuu

SEQ ID NO: 12532 - RNA, 22 nt, Unknown
  Description of Unknown: Influenza genomic target sequence
ccaucaggccaugagccuguuc

SEQ ID NO: 12533 - RNA, 22 nt, Unknown
  Description of Unknown: Influenza genomic target sequence
ccacaaaacacaacaauacugu

SEQ ID NO: 12534 - RNA, 22 nt, Unknown
  Description of Unknown: Influenza genomic target sequence
caucuuuacuccugcuuuugcu

SEQ ID NO: 12535 - RNA, 22 nt, Unknown
  Description of Unknown: Influenza genomic target sequence
guuauuaucuuuugauuuggau

SEQ ID NO: 12536 - RNA, 22 nt, Unknown
  Description of Unknown: Influenza genomic target sequence
aauggugagagaaacagagcca

SEQ ID NO: 12537 - RNA, 22 nt, Unknown
  Description of Unknown: Influenza genomic target sequence
aguagaaacaagguaguuuuuu

SEQ ID NO: 12538 - RNA, 22 nt, Unknown
  Description of Unknown: Influenza genomic target sequence
cauccacagcacucugcuguuc

SEQ ID NO: 12539 - RNA, 22 nt, Unknown
  Description of Unknown: Influenza genomic target sequence
gauauucuucccucauagacuc

SEQ ID NO: 12540 - RNA, 22 nt, Unknown
  Description of Unknown: Influenza genomic target sequence
ucaauaucuaccugcuuuugcu

SEQ ID NO: 12541 - RNA, 22 nt, Unknown
  Description of Unknown: Influenza genomic target sequence
uacguuucgaccucgguuagaa

SEQ ID NO: 12542 - RNA, 22 nt, Unknown
  Description of Unknown: Influenza genomic target sequence
ucucggcuuugagggggccuga

SEQ ID NO: 12543 - RNA, 22 nt, Unknown
  Description of Unknown: Influenza genomic target sequence
aguagaaacaaggguguuuuuu

SEQ ID NO: 12544 - RNA, 22 nt, Unknown
  Description of Unknown: Influenza genomic target sequence
uaaauaagcugaaacgagaaag

SEQ ID NO: 12545 - RNA, 22 nt, Unknown
  Description of Unknown: Influenza genomic target sequence
uucuuaucucuugcuccacuuc

SEQ ID NO: 12546 - RNA, 22 nt, Unknown
  Description of Unknown: Influenza genomic target sequence
uuuuugucacccugcuuuugcu

SEQ ID NO: 12547 - RNA, 22 nt, Unknown
  Description of Unknown: Influenza genomic target sequence
ugccaaagaaagcaaucuaccu

SEQ ID NO: 12548 - RNA, 22 nt, Unknown
  Description of Unknown: Influenza genomic target sequence
cgaucaaggaauggggcaucac

SEQ ID NO: 12549-13000 - skipped (452 entries)

SEQ ID NO: 13001 - DNA, 22 bp, Artificial Sequence
  Description of Artificial Sequence: Synthetic oligonucleotide
tgaaccaagacgcagtattatt

SEQ ID NO: 13002 - DNA, 22 bp, Artificial Sequence
  Description of Artificial Sequence: Synthetic oligonucleotide
ttatcttcatgtgtgttaactg

SEQ ID NO: 13003 - DNA, 22 bp, Artificial Sequence
  Description of Artificial Sequence: Synthetic oligonucleotide
caagcacaacccatcaaattgg

SEQ ID NO: 13004 - DNA, 22 bp, Artificial Sequence
  Description of Artificial Sequence: Synthetic oligonucleotide
gatagtatagtgttccatcata

SEQ ID NO: 13005 - DNA, 22 bp, Artificial Sequence
  Description of Artificial Sequence: Synthetic oligonucleotide
tgctgtatatcaatacagtatg

SEQ ID NO: 13006 - DNA, 22 bp, Artificial Sequence
  Description of Artificial Sequence: Synthetic oligonucleotide
agcgcactattgtaacaagtag

SEQ ID NO: 13007 - DNA, 22 bp, Artificial Sequence
  Description of Artificial Sequence: Synthetic oligonucleotide
atattccatgtgaaattccagt

SEQ ID NO: 13008 - DNA, 22 bp, Artificial Sequence
  Description of Artificial Sequence: Synthetic oligonucleotide
ttacaacgcaaccttcaggtct

SEQ ID NO: 13009 - DNA, 22 bp, Artificial Sequence
  Description of Artificial Sequence: Synthetic oligonucleotide
tctttaaaaagaccacaaccct

SEQ ID NO: 13010 - DNA, 22 bp, Artificial Sequence
  Description of Artificial Sequence: Synthetic oligonucleotide
gaagcactgcctgaataatact

SEQ ID NO: 13011 - DNA, 22 bp, Artificial Sequence
  Description of Artificial Sequence: Synthetic oligonucleotide
caccacaggtatactatccttg

SEQ ID NO: 13012 - DNA, 22 bp, Artificial Sequence
  Description of Artificial Sequence: Synthetic oligonucleotide
gacagggactcagcattctgtg

SEQ ID NO: 13013 - DNA, 22 bp, Artificial Sequence
  Description of Artificial Sequence: Synthetic oligonucleotide
tcaactataatggcatccagtg

SEQ ID NO: 13014 - DNA, 22 bp, Artificial Sequence
  Description of Artificial Sequence: Synthetic oligonucleotide
acaatgaagagttaatagcctg

SEQ ID NO: 13015 - DNA, 22 bp, Artificial Sequence
  Description of Artificial Sequence: Synthetic oligonucleotide
agaaaacttgccactaaggatg

SEQ ID NO: 13016 - DNA, 22 bp, Artificial Sequence
  Description of Artificial Sequence: Synthetic oligonucleotide
caatggctgaacattatgtgag

SEQ ID NO: 13017 - DNA, 22 bp, Artificial Sequence
  Description of Artificial Sequence: Synthetic oligonucleotide
cacgcatacacgtggcaatgtc

SEQ ID NO: 13018 - DNA, 22 bp, Artificial Sequence
  Description of Artificial Sequence: Synthetic oligonucleotide
gagaaccattattaacagcatc

SEQ ID NO: 13019 - DNA, 22 bp, Artificial Sequence
  Description of Artificial Sequence: Synthetic oligonucleotide
ccattaagatcctgattatcta

SEQ ID NO: 13020 - DNA, 22 bp, Artificial Sequence
  Description of Artificial Sequence: Synthetic oligonucleotide
atagtaatgcatacaatgcata

SEQ ID NO: 13021 - DNA, 22 bp, Artificial Sequence
  Description of Artificial Sequence: Synthetic oligonucleotide
cgaccataaccatcaatagcca

SEQ ID NO: 13022 - DNA, 22 bp, Artificial Sequence
  Description of Artificial Sequence: Synthetic oligonucleotide
caacatactattgtcattaaaa

SEQ ID NO: 13023-13100 - skipped (78 entries)

SEQ ID NO: 13101 - RNA, 22 nt, Artificial Sequence
  Description of Artificial Sequence: Synthetic oligonucleotide
ugaaccaagacgcaguauuauu

SEQ ID NO: 13102 - RNA, 22 nt, Artificial Sequence
  Description of Artificial Sequence: Synthetic oligonucleotide
uuaucuucauguguguuaacug

SEQ ID NO: 13103 - RNA, 22 nt, Artificial Sequence
  Description of Artificial Sequence: Synthetic oligonucleotide
caagcacaacccaucaaauugg

SEQ ID NO: 13104 - RNA, 22 nt, Artificial Sequence
  Description of Artificial Sequence: Synthetic oligonucleotide
gauaguauaguguuccaucaua

SEQ ID NO: 13105 - RNA, 22 nt, Artificial Sequence
  Description of Artificial Sequence: Synthetic oligonucleotide
ugcuguauaucaauacaguaug

SEQ ID NO: 13106 - RNA, 22 nt, Artificial Sequence
  Description of Artificial Sequence: Synthetic oligonucleotide
agcgcacuauuguaacaaguag

SEQ ID NO: 13107 - RNA, 22 nt, Artificial Sequence
  Description of Artificial Sequence: Synthetic oligonucleotide
auauuccaugugaaauuccagu

SEQ ID NO: 13108 - RNA, 22 nt, Artificial Sequence
  Description of Artificial Sequence: Synthetic oligonucleotide
uuacaacgcaaccuucaggucu

SEQ ID NO: 13109 - RNA, 22 nt, Artificial Sequence
  Description of Artificial Sequence: Synthetic oligonucleotide
ucuuuaaaaagaccacaacccu

SEQ ID NO: 13110 - RNA, 22 nt, Artificial Sequence
  Description of Artificial Sequence: Synthetic oligonucleotide
gaagcacugccugaauaauacu

SEQ ID NO: 13111 - RNA, 22 nt, Artificial Sequence
  Description of Artificial Sequence: Synthetic oligonucleotide
caccacagguauacuauccuug

SEQ ID NO: 13112 - RNA, 22 nt, Artificial Sequence
  Description of Artificial Sequence: Synthetic oligonucleotide
gacagggacucagcauucugug

SEQ ID NO: 13113 - RNA, 22 nt, Artificial Sequence
  Description of Artificial Sequence: Synthetic oligonucleotide
ucaacuauaauggcauccagug

SEQ ID NO: 13114 - RNA, 22 nt, Artificial Sequence
  Description of Artificial Sequence: Synthetic oligonucleotide
acaaugaagaguuaauagccug

SEQ ID NO: 13115 - RNA, 22 nt, Artificial Sequence
  Description of Artificial Sequence: Synthetic oligonucleotide
agaaaacuugccacuaaggaug

SEQ ID NO: 13116 - RNA, 22 nt, Artificial Sequence
  Description of Artificial Sequence: Synthetic oligonucleotide
caauggcugaacauuaugugag

SEQ ID NO: 13117 - RNA, 22 nt, Artificial Sequence
  Description of Artificial Sequence: Synthetic oligonucleotide
cacgcauacacguggcaauguc

SEQ ID NO: 13118 - RNA, 22 nt, Artificial Sequence
  Description of Artificial Sequence: Synthetic oligonucleotide
gagaaccauuauuaacagcauc

SEQ ID NO: 13119 - RNA, 22 nt, Artificial Sequence
  Description of Artificial Sequence: Synthetic oligonucleotide
ccauuaagauccugauuaucua

SEQ ID NO: 13120 - RNA, 22 nt, Artificial Sequence
  Description of Artificial Sequence: Synthetic oligonucleotide
auaguaaugcauacaaugcaua

SEQ ID NO: 13121 - RNA, 22 nt, Artificial Sequence
  Description of Artificial Sequence: Synthetic oligonucleotide
cgaccauaaccaucaauagcca

SEQ ID NO: 13122 - RNA, 22 nt, Artificial Sequence
  Description of Artificial Sequence: Synthetic oligonucleotide
caacauacuauugucauuaaaa

SEQ ID NO: 13123-13200 - skipped (78 entries)

SEQ ID NO: 13201 - RNA, 22 nt, Unknown
  Description of Unknown: Target viral genome RNA sequence
aauaauacugcgucuugguuca

SEQ ID NO: 13202 - RNA, 22 nt, Unknown
  Description of Unknown: Target viral genome RNA sequence
acuggaauuucacauggaauau

SEQ ID NO: 13203 - RNA, 22 nt, Unknown
  Description of Unknown: Target viral genome RNA sequence
agaccugaagguugcguuguaa

SEQ ID NO: 13204 - RNA, 22 nt, Unknown
  Description of Unknown: Target viral genome RNA sequence
aggguuguggucuuuuuaaaga

SEQ ID NO: 13205 - RNA, 22 nt, Unknown
  Description of Unknown: Target viral genome RNA sequence
aguauuauucaggcagugcuuc

SEQ ID NO: 13206 - RNA, 22 nt, Unknown
  Description of Unknown: Target viral genome RNA sequence
caaggauaguauaccuguggug

SEQ ID NO: 13207 - RNA, 22 nt, Unknown
  Description of Unknown: Target viral genome RNA sequence
cacagaaugcugagucccuguc

SEQ ID NO: 13208 - RNA, 22 nt, Unknown
  Description of Unknown: Target viral genome RNA sequence
cacuggaugccauuauaguuga

SEQ ID NO: 13209 - RNA, 22 nt, Unknown
  Description of Unknown: Target viral genome RNA sequence
caggcuauuaacucuucauugu

SEQ ID NO: 13210 - RNA, 22 nt, Unknown
  Description of Unknown: Target viral genome RNA sequence
caguuaacacacaugaagauaa

SEQ ID NO: 13211 - RNA, 22 nt, Unknown
  Description of Unknown: Target viral genome RNA sequence
cauacuguauugauauacagca

SEQ ID NO: 13212 - RNA, 22 nt, Unknown
  Description of Unknown: Target viral genome RNA sequence
cauccuuaguggcaaguuuucu

SEQ ID NO: 13213 - RNA, 22 nt, Unknown
  Description of Unknown: Target viral genome RNA sequence
ccaauuugauggguugugcuug

SEQ ID NO: 13214 - RNA, 22 nt, Unknown
  Description of Unknown: Target viral genome RNA sequence
cuacuuguuacaauagugcgcu

SEQ ID NO: 13215 - RNA, 22 nt, Unknown
  Description of Unknown: Target viral genome RNA sequence
cucacauaauguucagccauug

SEQ ID NO: 13216 - RNA, 22 nt, Unknown
  Description of Unknown: Target viral genome RNA sequence
gacauugccacguguaugcgug

SEQ ID NO: 13217 - RNA, 22 nt, Unknown
  Description of Unknown: Target viral genome RNA sequence
gaugcuguuaauaaugguucuc

SEQ ID NO: 13218 - RNA, 22 nt, Unknown
  Description of Unknown: Target viral genome RNA sequence
uagauaaucaggaucuuaaugg

SEQ ID NO: 13219 - RNA, 22 nt, Unknown
  Description of Unknown: Target viral genome RNA sequence
uaugauggaacacuauacuauc

SEQ ID NO: 13220 - RNA, 22 nt, Unknown
  Description of Unknown: Target viral genome RNA sequence
uaugcauuguaugcauuacuau

SEQ ID NO: 13221 - RNA, 22 nt, Unknown
  Description of Unknown: Target viral genome RNA sequence
uggcuauugaugguuauggucg

SEQ ID NO: 13222 - RNA, 22 nt, Unknown
  Description of Unknown: Target viral genome RNA sequence
uuuuaaugacaauaguauguug

SEQ ID NO: 13223-13600 - skipped (378 entries)

SEQ ID NO: 13601 - DNA, 23 bp, Artificial Sequence
  Description of Artificial Sequence: Synthetic oligonucleotide
actcactgacaatgaaggccagc

SEQ ID NO: 13602 - DNA, 23 bp, Artificial Sequence
  Description of Artificial Sequence: Synthetic oligonucleotide
gcaaaaattaaccagggctccaa

SEQ ID NO: 13603 - DNA, 23 bp, Artificial Sequence
  Description of Artificial Sequence: Synthetic oligonucleotide
gtacacatcattcagcaccatga

SEQ ID NO: 13604 - DNA, 23 bp, Artificial Sequence
  Description of Artificial Sequence: Synthetic oligonucleotide
agcccttaaaaacgtacaggccc

SEQ ID NO: 13605 - DNA, 23 bp, Artificial Sequence
  Description of Artificial Sequence: Synthetic oligonucleotide
tacagcgtaaagaaaccactgct

SEQ ID NO: 13606 - DNA, 23 bp, Artificial Sequence
  Description of Artificial Sequence: Synthetic oligonucleotide
caatatcataaaaacagggccgg

SEQ ID NO: 13607 - RNA, 22 nt, Artificial Sequence
  Description of Artificial Sequence: Synthetic oligonucleotide
ucuacauucuugaagcgcacac

SEQ ID NO: 13608 - RNA, 22 nt, Artificial Sequence
  Description of Artificial Sequence: Synthetic oligonucleotide
agaaaucaugcuuagcaacagc

SEQ ID NO: 13609 - RNA, 22 nt, Artificial Sequence
  Description of Artificial Sequence: Synthetic oligonucleotide
ucaucaaaguuacgcagagcga

SEQ ID NO: 13610 - RNA, 22 nt, Artificial Sequence
  Description of Artificial Sequence: Synthetic oligonucleotide
caacaacuccuuugagcaccau

SEQ ID NO: 13611 - RNA, 22 nt, Artificial Sequence
  Description of Artificial Sequence: Synthetic oligonucleotide
auuagucauacccauaacaggc

SEQ ID NO: 13612 - RNA, 22 nt, Artificial Sequence
  Description of Artificial Sequence: Synthetic oligonucleotide
guuuaaagugguaaccagcagu

SEQ ID NO: 13613 - RNA, 22 nt, Artificial Sequence
  Description of Artificial Sequence: Synthetic oligonucleotide
cuguacucaaagcagcgacaga

SEQ ID NO: 13614 - RNA, 22 nt, Artificial Sequence
  Description of Artificial Sequence: Synthetic oligonucleotide
aaucuuuaauugcagcaucacc

SEQ ID NO: 13615 - RNA, 22 nt, Artificial Sequence
  Description of Artificial Sequence: Synthetic oligonucleotide
cucuagauguaauacagccacc

SEQ ID NO: 13616 - RNA, 22 nt, Artificial Sequence
  Description of Artificial Sequence: Synthetic oligonucleotide
aaacuuauuaaggggccaacca

SEQ ID NO: 13617 - RNA, 22 nt, Artificial Sequence
  Description of Artificial Sequence: Synthetic oligonucleotide
aguagcuaauaaagagacgcca

SEQ ID NO: 13618 - RNA, 22 nt, Artificial Sequence
  Description of Artificial Sequence: Synthetic oligonucleotide
ccauaaaacuugguagugccga

SEQ ID NO: 13619 - RNA, 22 nt, Artificial Sequence
  Description of Artificial Sequence: Synthetic oligonucleotide
acauacgaaucauugagggcau

SEQ ID NO: 13620 - RNA, 22 nt, Artificial Sequence
  Description of Artificial Sequence: Synthetic oligonucleotide
accauuugaauaaacaaccucg

SEQ ID NO: 13621 - RNA, 22 nt, Artificial Sequence
  Description of Artificial Sequence: Synthetic oligonucleotide
aucaccagaaguuguaccacca

SEQ ID NO: 13622 - RNA, 22 nt, Artificial Sequence
  Description of Artificial Sequence: Synthetic oligonucleotide
uaauguuagaacuuacagccug

SEQ ID NO: 13623 - RNA, 22 nt, Artificial Sequence
  Description of Artificial Sequence: Synthetic oligonucleotide
aucaucagaaagaaucaucaua

SEQ ID NO: 13624 - RNA, 22 nt, Artificial Sequence
  Description of Artificial Sequence: Synthetic oligonucleotide
gagcaaaauucaugagguccua

SEQ ID NO: 13625 - RNA, 22 nt, Artificial Sequence
  Description of Artificial Sequence: Synthetic oligonucleotide
ccagcagaaauaauacggcuag

SEQ ID NO: 13626 - RNA, 22 nt, Artificial Sequence
  Description of Artificial Sequence: Synthetic oligonucleotide
gccagagaaacauagcguucca

SEQ ID NO: 13627 - RNA, 22 nt, Artificial Sequence
  Description of Artificial Sequence: Synthetic oligonucleotide
agcccauuugacuguagccauc

SEQ ID NO: 13628 - RNA, 22 nt, Artificial Sequence
  Description of Artificial Sequence: Synthetic oligonucleotide
cuaucaacaagcaaagggcuau

SEQ ID NO: 13629 - RNA, 22 nt, Artificial Sequence
  Description of Artificial Sequence: Synthetic oligonucleotide
uuccaauagccuauaagcuuau

SEQ ID NO: 13630 - RNA, 22 nt, Artificial Sequence
  Description of Artificial Sequence: Synthetic oligonucleotide
ugacaaauccacccguuugccc

SEQ ID NO: 13631 - RNA, 22 nt, Artificial Sequence
  Description of Artificial Sequence: Synthetic oligonucleotide
agcaccaucaacagcaacccag

SEQ ID NO: 13632 - RNA, 22 nt, Artificial Sequence
  Description of Artificial Sequence: Synthetic oligonucleotide
gguucugaauucuugcgccuaa

SEQ ID NO: 13633 - RNA, 22 nt, Artificial Sequence
  Description of Artificial Sequence: Synthetic oligonucleotide
uuugauugaagugugguaucuc

SEQ ID NO: 13634 - RNA, 22 nt, Artificial Sequence
  Description of Artificial Sequence: Synthetic oligonucleotide
caguaacaccauuugggagcuu

SEQ ID NO: 13635 - RNA, 22 nt, Artificial Sequence
  Description of Artificial Sequence: Synthetic oligonucleotide
ugccuucaugaugucauccuga

SEQ ID NO: 13636 - RNA, 22 nt, Artificial Sequence
  Description of Artificial Sequence: Synthetic oligonucleotide
aaccuaaagauuuaagagccgc

SEQ ID NO: 13637 - RNA, 22 nt, Artificial Sequence
  Description of Artificial Sequence: Synthetic oligonucleotide
aaaccuaaagauuuaagagccg

SEQ ID NO: 13638 - RNA, 22 nt, Artificial Sequence
  Description of Artificial Sequence: Synthetic oligonucleotide
ggggccaaaacauugugugaca

SEQ ID NO: 13639 - RNA, 22 nt, Artificial Sequence
  Description of Artificial Sequence: Synthetic oligonucleotide
gcacuuccaaaguuguggucaa

SEQ ID NO: 13640 - RNA, 22 nt, Artificial Sequence
  Description of Artificial Sequence: Synthetic oligonucleotide
agcuuuaacaccauuggccaca

SEQ ID NO: 13641 - RNA, 22 nt, Artificial Sequence
  Description of Artificial Sequence: Synthetic oligonucleotide
acggcacaagcucagcaaauug

SEQ ID NO: 13642 - RNA, 22 nt, Artificial Sequence
  Description of Artificial Sequence: Synthetic oligonucleotide
ucuuuggaaacaaugugacuau

SEQ ID NO: 13643 - RNA, 22 nt, Artificial Sequence
  Description of Artificial Sequence: Synthetic oligonucleotide
uccucaagaaacuuacccaagu

SEQ ID NO: 13644 - RNA, 22 nt, Artificial Sequence
  Description of Artificial Sequence: Synthetic oligonucleotide
guuguugcauuucucuagugaa

SEQ ID NO: 13645 - RNA, 22 nt, Artificial Sequence
  Description of Artificial Sequence: Synthetic oligonucleotide
caauagaaacuucaucacgcac

SEQ ID NO: 13646 - RNA, 22 nt, Artificial Sequence
  Description of Artificial Sequence: Synthetic oligonucleotide
acuucaucaauuaugucaguuu

SEQ ID NO: 13647 - DNA, 22 bp, Artificial Sequence
  Description of Artificial Sequence: Synthetic oligonucleotide
aaattgtgcaatttgcggccaa

SEQ ID NO: 13648 - DNA, 22 bp, Artificial Sequence
  Description of Artificial Sequence: Synthetic oligonucleotide
gcagcagatttcttagtgacag

SEQ ID NO: 13649 - DNA, 22 bp, Artificial Sequence
  Description of Artificial Sequence: Synthetic oligonucleotide
tgtgacttccatgccaatgcgc

SEQ ID NO: 13650 - skipped

SEQ ID NO: 13651 - DNA, 22 bp, Artificial Sequence
  Description of Artificial Sequence: Synthetic oligonucleotide
acagcattctgtgaattataag

SEQ ID NO: 13652 - DNA, 22 bp, Artificial Sequence
  Description of Artificial Sequence: Synthetic oligonucleotide
tcccagcgtcaatatgctgttt

SEQ ID NO: 13653 - DNA, 22 bp, Artificial Sequence
  Description of Artificial Sequence: Synthetic oligonucleotide
aaacacggacacccaaagtagt

SEQ ID NO: 13654 - DNA, 22 bp, Artificial Sequence
  Description of Artificial Sequence: Synthetic oligonucleotide
acgagacctcccggggcactcg

SEQ ID NO: 13655 - DNA, 22 bp, Artificial Sequence
  Description of Artificial Sequence: Synthetic oligonucleotide
atgcctataacaaatgatcaga

SEQ ID NO: 13656 - DNA, 22 bp, Artificial Sequence
  Description of Artificial Sequence: Synthetic oligonucleotide
gggagccagattgcgatcgccc

SEQ ID NO: 13657 - DNA, 22 bp, Artificial Sequence
  Description of Artificial Sequence: Synthetic oligonucleotide
gagaatctcttcgccaactgtg

SEQ ID NO: 13658 - DNA, 22 bp, Artificial Sequence
  Description of Artificial Sequence: Synthetic oligonucleotide
acctatttaggaccgccgtaca

SEQ ID NO: 13659 - DNA, 22 bp, Artificial Sequence
  Description of Artificial Sequence: Synthetic oligonucleotide
ttcccatcatgttgtacacaca

SEQ ID NO: 13660 - DNA, 22 bp, Artificial Sequence
  Description of Artificial Sequence: Synthetic oligonucleotide
tataaaaaacttaggagcaaag

SEQ ID NO: 13661 - DNA, 22 bp, Artificial Sequence
  Description of Artificial Sequence: Synthetic oligonucleotide
gatgaagattaaaaccttcatc

SEQ ID NO: 13662 - DNA, 22 bp, Artificial Sequence
  Description of Artificial Sequence: Synthetic oligonucleotide
tctctcgcgtttcagcatattg

SEQ ID NO: 13663 - DNA, 22 bp, Artificial Sequence
  Description of Artificial Sequence: Synthetic oligonucleotide
atgtaacacccctacaatggat

SEQ ID NO: 13664 - DNA, 22 bp, Artificial Sequence
  Description of Artificial Sequence: Synthetic oligonucleotide
gggttggttggatgaatatagg

SEQ ID NO: 13665-13670 - skipped (6 entries)

SEQ ID NO: 13671 - DNA, 22 bp, Unknown
  Description of Unknown: crRNA target sequence
cttataattcacagaatgctgt

SEQ ID NO: 13672 - DNA, 22 bp, Unknown
  Description of Unknown: crRNA target sequence
aaacagcatattgacgctggga

SEQ ID NO: 13673 - DNA, 22 bp, Unknown
  Description of Unknown: crRNA target sequence
actactttgggtgtccgtgttt

SEQ ID NO: 13674 - DNA, 22 bp, Unknown
  Description of Unknown: crRNA target sequence
cgagtgccccgggaggtctcgt

SEQ ID NO: 13675 - DNA, 22 bp, Unknown
  Description of Unknown: crRNA target sequence
tctgatcatttgttataggcat

SEQ ID NO: 13676 - DNA, 22 bp, Unknown
  Description of Unknown: crRNA target sequence
gggcgatcgcaatctggctccc

SEQ ID NO: 13677 - DNA, 22 bp, Unknown
  Description of Unknown: crRNA target sequence
cacagttggcgaagagattctc

SEQ ID NO: 13678 - DNA, 22 bp, Unknown
  Description of Unknown: crRNA target sequence
tgtacggcggtcctaaataggt

SEQ ID NO: 13679 - DNA, 22 bp, Unknown
  Description of Unknown: crRNA target sequence
tgtgtgtacaacatgatgggaa

SEQ ID NO: 13680 - DNA, 22 bp, Unknown
  Description of Unknown: crRNA target sequence
ctttgctcctaagttttttata

SEQ ID NO: 13681 - DNA, 22 bp, Unknown
  Description of Unknown: crRNA target sequence
gatgaaggttttaatcttcatc

SEQ ID NO: 13682 - DNA, 22 bp, Unknown
  Description of Unknown: crRNA target sequence
caatatgctgaaacgcgagaga

SEQ ID NO: 13683 - DNA, 22 bp, Unknown
  Description of Unknown: crRNA target sequence
atccattgtaggggtgttacat

SEQ ID NO: 13684 - DNA, 22 bp, Unknown
  Description of Unknown: crRNA target sequence
cctatattcatccaaccaaccc

SEQ ID NO: 13685-13700 - skipped (16 entries)

SEQ ID NO: 13701 - DNA, 22 bp, Artificial Sequence
  Description of Artificial Sequence: Synthetic oligonucleotide
tctgatcccaatatttaaaata

SEQ ID NO: 13702 - DNA, 22 bp, Artificial Sequence
  Description of Artificial Sequence: Synthetic oligonucleotide
ggcgtacacgttcacctaagtt

SEQ ID NO: 13703 - DNA, 22 bp, Artificial Sequence
  Description of Artificial Sequence: Synthetic oligonucleotide
cttgagcacactcattagctaa

SEQ ID NO: 13704 - DNA, 22 bp, Artificial Sequence
  Description of Artificial Sequence: Synthetic oligonucleotide
tagcagggtcagcagcatacac

SEQ ID NO: 13705 - DNA, 22 bp, Artificial Sequence
  Description of Artificial Sequence: Synthetic oligonucleotide
aaacattaaagtttgcacaatg

SEQ ID NO: 13706 - DNA, 22 bp, Artificial Sequence
  Description of Artificial Sequence: Synthetic oligonucleotide
gacaacaattagtttttaggaa

SEQ ID NO: 13707 - DNA, 22 bp, Artificial Sequence
  Description of Artificial Sequence: Synthetic oligonucleotide
atatatgtggtaccatgtcacc

SEQ ID NO: 13708 - DNA, 22 bp, Artificial Sequence
  Description of Artificial Sequence: Synthetic oligonucleotide
attaccttcatcaaaatgcctt

SEQ ID NO: 13709 - DNA, 22 bp, Artificial Sequence
  Description of Artificial Sequence: Synthetic oligonucleotide
cttgattatctaatgtcagtac

SEQ ID NO: 13710 - DNA, 22 bp, Artificial Sequence
  Description of Artificial Sequence: Synthetic oligonucleotide
aagaatctacaacaggaactcc

SEQ ID NO: 13711 - DNA, 23 bp, Artificial Sequence
  Description of Artificial Sequence: Synthetic oligonucleotide
atcataagtgtaccatctgtttt

SEQ ID NO: 13712 - DNA, 22 bp, Artificial Sequence
  Description of Artificial Sequence: Synthetic oligonucleotide
agcaaaattcatgaggtccttt

SEQ ID NO: 13713 - DNA, 22 bp, Artificial Sequence
  Description of Artificial Sequence: Synthetic oligonucleotide
aacattttgcttcagacataaa

SEQ ID NO: 13714 - DNA, 22 bp, Artificial Sequence
  Description of Artificial Sequence: Synthetic oligonucleotide
cactattagcataagcagttgt

SEQ ID NO: 13715 - DNA, 22 bp, Artificial Sequence
  Description of Artificial Sequence: Synthetic oligonucleotide
ttgaatctgagggtccaccaaa

SEQ ID NO: 13716 - DNA, 22 bp, Artificial Sequence
  Description of Artificial Sequence: Synthetic oligonucleotide
ccccactgcgttctccattctg

SEQ ID NO: 13717 - DNA, 22 bp, Artificial Sequence
  Description of Artificial Sequence: Synthetic oligonucleotide
tgaaccaagacgcagtattatt

SEQ ID NO: 13718 - DNA, 22 bp, Artificial Sequence
  Description of Artificial Sequence: Synthetic oligonucleotide
aacgccttgtcctcgagggaat

SEQ ID NO: 13719 - DNA, 22 bp, Artificial Sequence
  Description of Artificial Sequence: Synthetic oligonucleotide
tactacagatagagacaccagc

SEQ ID NO: 13720 - DNA, 22 bp, Artificial Sequence
  Description of Artificial Sequence: Synthetic oligonucleotide
acatttaggataatcccaaccc

SEQ ID NO: 13721 - DNA, 22 bp, Artificial Sequence
  Description of Artificial Sequence: Synthetic oligonucleotide
tattaaatggaaaaccagctga

SEQ ID NO: 13722 - DNA, 22 bp, Artificial Sequence
  Description of Artificial Sequence: Synthetic oligonucleotide
acagtagctcctctagtggcgg

SEQ ID NO: 13723 - DNA, 22 bp, Artificial Sequence
  Description of Artificial Sequence: Synthetic oligonucleotide
caccatcgtaacaatcaaagta

SEQ ID NO: 13724 - DNA, 22 bp, Artificial Sequence
  Description of Artificial Sequence: Synthetic oligonucleotide
aacatatagtgaaccgccacac

SEQ ID NO: 13725 - DNA, 22 bp, Artificial Sequence
  Description of Artificial Sequence: Synthetic oligonucleotide
ggtcagtctcagtccaacattt

SEQ ID NO: 13726 - DNA, 22 bp, Artificial Sequence
  Description of Artificial Sequence: Synthetic oligonucleotide
aaattgtgcaatttgcggccaa

SEQ ID NO: 13727 - DNA, 22 bp, Artificial Sequence
  Description of Artificial Sequence: Synthetic oligonucleotide
gcagcagatttcttagtgacag

SEQ ID NO: 13728 - DNA, 22 bp, Artificial Sequence
  Description of Artificial Sequence: Synthetic oligonucleotide
tgtgacttccatgccaatgcgc

SEQ ID NO: 13729 - DNA, 22 bp, Artificial Sequence
  Description of Artificial Sequence: Synthetic oligonucleotide
gaactcgtatccgatgataaga

SEQ ID NO: 13730 - skipped

SEQ ID NO: 13731 - DNA, 20 bp, Artificial Sequence
  Description of Artificial Sequence: Synthetic primer
aacgggtttgcggtgtaagt

SEQ ID NO: 13732 - DNA, 33 bp, Artificial Sequence
  Description of Artificial Sequence: Synthetic primer
aatttagcaaaaccagctactttatcattgtag

SEQ ID NO: 13733 - DNA, 21 bp, Artificial Sequence
  Description of Artificial Sequence: Synthetic primer
caggtggaacctcatcaggag

SEQ ID NO: 13734 - DNA, 34 bp, Artificial Sequence
  Description of Artificial Sequence: Synthetic primer
gttaccatcagtagataaaagtgcattaacattg

SEQ ID NO: 13735 - DNA, 20 bp, Artificial Sequence
  Description of Artificial Sequence: Synthetic primer
tgcaccaccaactgcttagc

SEQ ID NO: 13736 - DNA, 21 bp, Artificial Sequence
  Description of Artificial Sequence: Synthetic primer
ggcatggactgtggtcatgag

SEQ ID NO: 13737 - DNA, 42 bp, Severe acute respiratory syndrome coronavirus 2
aggtttacccaataatactgcgtcttggttcaccgctctcac

SEQ ID NO: 13738 - DNA, 42 bp, Severe acute respiratory syndrome coronavirus 2
gggattacccaataatactgcgtcttggttcaccgctctcac

SEQ ID NO: 13739 - DNA, 42 bp, Severe acute respiratory syndrome coronavirus 2
gggattacccaatagtactgcgtcttggttcaccgctctcac

SEQ ID NO: 13740 - DNA, 15 bp, Artificial Sequence
  Description of Artificial Sequence: Synthetic oligonucleotide
cagtgaggctcggct
